United States Patent Application Publication US 2008/0039413 A1 - sequence listing, part 9

SEQ ID NO: 1043 - DNA, 3870 bp, Homo sapiens
cggcgcgacccggcggcggggccacccgcgagtccagcgtcgccgcagccccccaatgcggccgcgagaagcagcgggggggcaggcgatcgaaggagccttcacgtaaatgggtccagtcatgcctcccagtaagaagccagaaagctcaggaattagtgtctccagtggactgagtcagtgttacgggggcagcggtttctccaaggcccttcaggaagacgatgacctcgacttttctctgcctgacatccgattagaagagggggccatggaagatgaagagctgaccaacctgaactggctgcacgagagcaagaacttgctgaagagctttggggagtcggtcctcaggagtgtcagccccgtccaggacctggacgatgacacccccccatcccctgcccactctgacatgccctacgatgccaggcagaaccccaactgcaaacccccctactccttcagctgcctcatatttatggccatcgaggactctccaaccaagcgcctgccagtgaaggatatctacaactggatcttggaacattttccgtattttgcaaatgcacctactgggtggaaaaactcagtgagacacaatttatcattgaataagtgttttaagaaagtggacaaagagaggagtcagagtattgggaaagggtcgttgtggtgcatagacccagagtatagacaaaatctaattcaggctttgaaaaagacaccttatcacccacacccacacgtgttcaatacacctcccacctgtcctcaggcatatcaaagcacatcaggtccacccatctggccgggcagtaccttcttcaagagaaatggagcccttctccaagatcctgacattgatgctgccagtgccatgatgcttttgaatactccccctgagatacaagcaggttttcctccaggagtgatccaaaatggagcgcgggtcctgagccgagggctgtttcctggcgtgcggccgctgccaatcactcccattggggtgacagcggccatgaggaatggcatcaccagctgccggatgcggactgagagtgagccatcttgtggctccccagtggtcagcggagaccccaaggaggatcacaactacagcagtgccaagtcctccaacgcccggagcacctcgcccaccagcgactccatctcctcctcctcctcctcagccgacgaccactatgagtttgccaccaaggggagccaggagggcagcgagggcagcgaggggagcttccggagccacgagagccccagcgacacggaagaggacgacaggaagcacagccagaaggagcccaaggattctctgggggacagcgggtacgcatcccagcacaagaagcgccagcacttcgccaaggccaggaaggtccccagcgacacactgcccctcaaaaagagacgcaccgaaaagccccccgagagcgatgatgaggagatgaaagaagcggcagggtccctcctgcacttagcagggatccggtcctgtttgaataacatcaccaatcggacggcaaaggggcagaaagagcaaaaggaaaccacaaaaaattaaaaacaagtcactgatttgttttgaacttacgaccatttggtttcagcatgtcaggagatttctaatgatttgtggcaatatcagcaattttttttcttttttcttgtttttggtttggttttctttcttttcttttccttttattttgttttaatttgccccctcttctttgttttggacccttaagaattttatttttaaaggagattgaagccatagaactcatattgacactcagctgttttacaaaagcttttcattatctgaagacaaaaccgaaaaagccaaaattaccattgcttcctccagcttgtcagaaacctgtggctgaatccgcagggatgtcaacgtcaatatcacaggaacacacattcggcacctagaaggcacgtgggcaaagtaatcatcgttcaggcccaacccttaggtttaaaaagtcaggttgtccatcccattgggttcactgagtgaaggcacataaagcaattgaggaggaggaggaacccctcgtccccctaggagcagacccaagcttgtggcaccaggcatctgatggtgccaggaaagccactggaattgtcacacggcgagcacagagggccggccaccagtcctcgatgcttctgaaccctgaagcccgatgacatcttacgaggtggacgttggactgttcatgcgcatcgggtgtcagtgactcatggagaagaaatggggtaaatttttagtgatgttgctaatcattgaattctgttctctattaaattaagaaaatgttccaaaagccataagcctgaagattggccctgtgcacgcacgcacacacacacacacacacacacacacacacacacacacacgaaggagagagagagaaaactgatggggaaaacaagctgtgtcttcttaactgcccaagtgaaaagcaaccaagtccaggaaattacaatagctgttaaggaaaggaaataatggtacagatctttttctgtctatcaaaactatttgatccaagtgaaaaaaaaaaaaaaactagaaagctacggaacctgccattagtattgtggtgtatttttaagattaaaggtacactgatggacaaaaaaaaaaagtaaaacatggcaaaaaataaaataactcctatactgccctcaaaatggagtttgcaattaatatcaggatttatctttgcaaaaatcagtgatttccacattcagccagtatagccagcagaaatttctgatccacaatgcatggattcctttgaagaaaaaaaagaaaaagagaaaaaaatcacaaaaacaaactttttttattcaaaagtaacaaagttcttgtaaggtaaataatgtatttagcatgaagcatgaattattttcatataaatatagaaaatagagaaaaggctatgcctgtaatttttaagcccttaggcttagagtttcttttggttttcttcttttttctttccttttctttgctttctttttttcctttttgtttttgtttttgttttttgtttttgtttttttttcgggttattttgttttggttttttgaagcaggtgtttaaggtttaaccttcttcagggacaaattctgactgttggggaacttactctgcaatataaaaatatcttcatgctctggtagggcttggatggttgaactctgtactgccttgtgtgcacttcagccccgaccccctctgattctctgttgaaaagtgtgtcctttctctctgtctgtacatgtttaacatgacgcaataatttgagggcaaacttagtagtgagtgtgtatgatagaatcaagagaattatgggacgcttacttgagaaaatcattaccatgatttggttctaggaaaaaggcattatttaaacatgcaacatttcttgagtatgtatgttgaggccatctgagctcatagctgattcagtaaccagtttcatgctgtgtcattcacactcactacttaatactgccatggtgaaaatgtggaggaaaaatgtatccatgtgtgtctgggaagcatatacacttgtacattttttaatactctgattctgtaacatttctgagttttgttttgttttacagaaaaaaaaaaaaagtgataaagcaatcagaagaccaagaggtttactattgatgcttagggtcgtctgaccttggctggccaatagacctacacggccaaattaatttacgagagtaataatttttcaaaaggagaaccataaaggagaaagaacgtgatgttctgttatgttcatgtaaacctaaag

SEQ ID NO: 1044 - protein, 488 aa, Homo sapiens; identical to SEQ ID NO: 1038

SEQ ID NO: 1045 - DNA, 161169 bp, Mus musculus
  misc_feature (1)...(161169): n = A, C, G or T/U
tataatattagaaacaatcccttccaatggtataaaaccatgtaagtttatacagcatgaaagattttctgttaattttttattgcatgggtgtgtgtgtgtgtgtgtgtgtgtgtgtgtgtgtacgcataccacagcagatccacggaggtcagacaccctgcagaaactgcctctctccttctaccatatgggttatcaggatcaaactcagttgtcaagtttgaaagctgagccagctcacagatgattgttgtgtgtgctggcccttaagaagaaggagtgagccgggcagtgatggcacacacctttaatcccagcactcgggaggcagaggcaggtggatttctgagttcgaggccagcctggtctacagagtgagttccaggacagccagggctatagagaaaccctgtctaaaccacccccaccccccaaaagaagaaggagtgtttcatctaatgttgggctgtggtctctgaagctcagagaatcctgcagaagggaaagggaggaagaggggcaaaggacaccacaagaaaatccacagaagccaccaacctggactcataggagctcacagagactgaaccaccaaccagaaagcctgcatgagactgacctaggccctctgcatataggttagagttgtgtagcttggtcttcctgtagaactcctagcagtgagaggaaatcctatctctgactctttctcctgcttttggggtccttttcctcccactaggttgcctcatccatcctcagtacaaggggaggtgcctagtcttactgcaacttgatatgccatggttggttgatattcataggaggcctgcacttttctgaagaaaaatgaaggagaggtggataggggtggggggatgaggcagaggaaaggtgtggggaggagggaagggaggggaaactgaacttggtgtgttaaaaaagaaagtatgtgtatagacacatacatacatatatacacatatctatatacatatatgtgcatatatgcatgtaaatatgcacacatgtgtatatgcatataaatatatatgtatgtgtacatatacacacatatagtgtacatgtatgtatatgcatatatacacatgtgtatataaatgtatgcacaaatatacacatacacatgtacacatatatagatatgtatatgtatacatatatatatgtatgtgtatatatatatatatatgtgtgtgtgtgtgtgtgtgtgtgtgtgtgtgtgttttcagtggcagacatggaaccatctggaaggaccgtgataaagaaaacatccacagaggacagagtcttctgggcaaagagaaaggagatggttccaagacagccctgggcttgagaaggaaaccctgctatatgttagagaccaagtggaggggcctagacagcaaagaaggcatcgctaaatcgtgatccccttggttggggaaagagcaatggctccgttcccaatatactgttgagcccagcgtagtcctcccttgaccttctgaggtctgcacttgataatgctgccaagagtgaggttactttcccaaacagtctgacatttagacactaagctctaggatcgagttccgtgtccatacatgtctccccttggttctcatcgagttgtactggttatacgacccagggcaatttacttaacctttatgttctctcatctggcaagcaggtgctatcttcccaaccgcaaatagaggaagtgagatcacccgtacaaagcctttcaaagagtacttggcacggagcgatgctccgagaatgctaccagacttttactgctgccggtagaggattgtgcttaagcgaaacagagcgcctggctgtcttccgtccggcttaggtagggtggcaccacggaaagctagtgacacaaacattcaccctctcatgggcagcctgccgcttaggccagggcacacccactctggggctctgtttcagctggcccctgctctccgcctagactaccagcttcagcagcttcttctccatcagtgaccattggctcctgggtggaagcaggcatcctccaactaaaaccacatcacaccctgtcccagatgcaggcaccgcatctctgaggttcatcaccagctcctctgaggtcaacccccataccccgcagcagcagcatcgtctttggtttcatttctgcttcccaacttacgctactataagaaaaaaaatgtctgagatatcaaatatgtcaacttaaagtaggaagtgggggttcagtcccgaggaagttccaaaagtggttagtttggttttgtttgttgtttttgttttttactgagacaaagtctcatatagtttgggctggccttgaacctgctatgtacctaaagatgacctagaacccatggttctactgtctacaccttctgaacaccaggattacagtgtactaccacatttggttttatgtgatgctaaggcgcatggcagacaagcattctacaaacaaactacatcgccagccttgcttccaaagctagctttatacactcacccacaatgatgccaacaacgttaaatgagaatcttttgattcatggataacttttcacctcttcattattcaaaaatgcaagagtcagcagatgtatgaagacaaatgaaatccagaagccatgaggaaaagccagaaagatgctacaagacagaagtaggaaaattcatacaagaggaagagcttttttctcattatgtctgttctcttttcttcatatgttttccttgctatgatccatccagactcaaactctctccctcactcttcttctttcttcgccctctggaaagaagatgagcctcagagacaagctaacatggagaaaagtgaaccagacagagggaagaggacagagaagagaggaaagacatgggattctggtgatgtcatcttagcaactgcaggcagctgcactccaaacttttcagtaacaagatctagtaaggtctctttgttttttctttaggtatcatagaattggattttcctatcttctgatggaaggagtcctgctggaaactgattattaagtatcaaaagcaagccaattccagaccagcctcacctgggccagacccgcctcacctgggccagacccgatcctgcatctccaagtctgccttattccaggccccacacagccaaataagtaggtaaaggcctgacttagtttgagtttcattgctgtgaagagacaccatgaccttcttataaaggaaaacatttattagggctgccttacagttcagaggctcagtccagtatcatcatggcaaaagcatggcagcacacaggcagacatgttgctagagaaggagctgagagttctacctgttgatctgcaggcagccttagaaggggactgtgtgccatactgggtgtggcttgagcatagaagacctcaaagcctgcccccacaatgacccacttcctctaacaagaccacacctactccaacaagccacacctcctaatagtgccactccctatgcaccaagcatttaaacacttgagtctacaaaggccattcctattcaaaccaccataggaccctagcactcaagtccctcaagacattgattccttgaagaaatgtcatgagaaacacttaggctctctggccaggtctcgactatgtctcatggttcaagtttcctgagaacaaagtataaagagcagggatttcattcataagaaataaaagcccaaacccatgctacatactctccaccacctataggacacgttggggctttgaggtataaactgtgctcaaccccaccagcatcaaacgcattacagatagcattctttctagttggctgtgtccagtttagtttactatagacagtgatccaggaggatactagtaaaaaggtggtatccatgatcctcagagtacaaaaagactgtgctacagagctgggaagggaagagaaaagaagccagattcagtagttcaaacaacacaagccctcactggattatgcaagctagcctgatctagcagtcttctatgctaaatgtggacatgggctcatagccccaagactaacaacactttaacaggtcctgcatcctagtcctgtatgtctctttcttcagggtaccaatttgggcaaacagtgaggaaaccatctgttttccaaagaagcgctttgatgtttggcaacggtgttcctgagactttattcaaatgggggcacagtcagaagttaaagagtctctacattttttttgtcctttattcttgaggacttttgaaaatatatacaatgaatatgatcagataggccccaccccttttccttcctccaactttcctgtattggatgctgcatgctaatacaaaggcatgcctgccgtggaatggctaacggctttctgactgagagctgagacctgctctacaggaggaagtttcatgcctgcttactgtaaccctggtcaaaatcccacagtcttagagtaaacacttttattgttatttttcctagatgatcaaattgccttctggatatttatgtttatagccatagacctaggcttctctcaacctttagtcaaggaagcttcttctccctggatgcagtcaacagaggaatgcctaactggtgaaaggcctgaggagaagagattgagtgctagctagagaaagtacccaagagctgaaggggtctccagccctataggtggaacagcaatacgaactaatcagtacccccagaactcatgtctctagctgcatatatagcagaagatggcctagttggccatcattgggaagaaaagccccttggtcttgcaaactttatatgccccagtacaggggaacgccagagccaagaagtaggagtgagtaggtagnnnnnnnnnnnnnnnnnnnnnnngggacttttgggatagcatttgaaatgtaaatgaagaaagtatctaataaaaaagaaagaaaaaaagagagagagattgagtgcttagccaatgagacacctatatcactctccgtacctctaaggctcagaagatatcctgggaaaagaggcagaaaccactaaggataggaggggtactgtaaagtgctgtcttttgcacacgacatggttatagctatgactataaactcatagcatctgtggatacctacatagacctgcacaaacctttcgtcttaataaactctcaggctgggcatggtggagcacatctgggtcacagaactcagaaggcagaggcagggggatctctgagttcgaagccagtatagactacacaagcacagtccagatttaaaacaaacaaacaaacaaacaacaataacaacaaccctgtctcaaaagacaaacaaacaaacagacaaacaaaaagagtctcaggattccatcacgttctctgtcctcatagatatgtgacccagaacagacagcttcaaacagtttgcctgtgtacagctttaattcagaactggcccccaaacactggagcaaggacattaaactataagcaaacagcagtttcttgattccccatgactcagaatccaaacagccagagaccaggttcttaatgagatgagtgactaaagctgacaccttgaagatcaatataggacacaaaggcttgcaggcaaggagactcagaggaccagaaagaacacagcagccttgagtcctcagcagcatggcagaggggactgctaacatggcgtagagatagtcagagaaaagaaagtcggtcctcacttggctgatctggaagatgcgtgcccagtgagctggggaagcattctgcatttctcaacatagaagcatggtgctgtcagacggagccatctggagagggtcacacctgagcttgctgtgttgggaaacattgtcctccccctggaacacacaggcaatgtctccatgcactctcaaggctgtatgtactctgtagaacagtgtagcccctggggaaagccactaaagcaagcccactaaaaagtacgcagtgggctttggatcagagacaacggggagcttagctttctctctaagactggtggatcccgaggatgtggacacactcagtggttgttcttgcagaggatctaggttcaggtttccctgaacccacatggaagcccacaactattcacatatccagttccaggggacccaacaccctcttctgccctccattgataccaggcacacatgtcgtacctatgcatatctcaggcatttaaaaaaaaaagattggtgattcaagtggccagctaaggatggtcaggacactgagccggcacaaatagttgtaagcagagactaagtcctagttactgtgaagagacaccatgagcaagccaacaatcaaaagatagcatttattggaggcttgcttatgtttttcagcgggtgagtacatgaccatcatggcagggagcatggcggcaggaaggcggaaatagcgctggagcagtagcaaagagcttacatcctgatggcgtccatgatcttccagaggtcctgagttcaattcgcagcaaccacatgatggctcacaaccatctctaatgggatctgatgccctcttctggtgtgtctgaagacagtgacagtgtactcatatacataaaataaataaataattctaaaaaaataaaataaataaaaaataagggatgaacatctctcaacctttgctctttccaagcagccattgaccaagaagacacacatcttaattaacttgctattgctgtgataaaataccataaccaaccttggggcaggaaaggttaattttactttcatttccccatcatggttcatcatttttttctcccccttcactttttcttcttgttccagaccctgttcacgacccataggtttttttgtttctcggtacagatggttgtgagccaccatgtggttgctgggatttgaactcatgacctccagaagagcagtcagtgctcttaactgctgagccatctcattcaccaaccccacagttcatcttcaaaggacacaaattggaggcaggcacccagaagcaggagctgacacagaagccatggaagactgctgcttattggcttgctcctggtggcctgctcagcctgcttccttagagaacccaggccacttgcgtgcagtgagttggaccctcccacatcagtcattaagagactgtaccacaggcttgcccacaggccagtgtggtgggagtattttctcagttgaagttccctcctttcaagagcaactctagcttgtatcaatttacataagcactatctgggcgggataaaaagagacagaaaataacctctttcctgcattaccactgagtagagacagttctaagctgttctagtaagtctgagacatttcgccagcccctctttattctcttttaactggtgtgcttcacgttcaatattctaactttcatggcttcctatttcccatttttttctctattaaatttttttcttacttccttttcctttacagcttttagtttatgatgtttctgccttcaccacacgtgctgtgctctgagagctggagacagcatggtagctgtgtgggtttcacttcacttctctgtcaggctcactgctgtgtgttgctgccttcccacacagtgctgtgttgaggcttggtctgctgctatgtgtggtcatgctaagtgtgaccccccaagacctgcttgccccagagatgaccaagtctacacatagatacaagtgacaatttgtggccatacccccaagttatttctgattggtgaataaagatgctgacagccaatagctgggcataattgagattggcggggcttggtgttccaggacttggggtctgaggagaccacaaggagagagagaagatggagagaagacagagacaccttgggttaggagtcaagaaagcatggccctgaggctggccaattggagttaagagcagcccagatgaaacatagtaataactcggggttatcaataggaaagtagagtctaataacatggaggatagatatctgcccacctcttgtgctcatcaagacgcattgtaaataataaaggttgtgtccatcttttatgtgggaactaagtggtcaaaggcgaagtagaaactcaagatcgggattaaatattttctacgacagtgctatagagtgtatgtatctacattctaggcagctcagctgctaatcttctttcctgggtcactgagagtcaaggaccatgatattcacacaacctatgccaacttgaactcgtgaactgaaagagtaagagcctgagcctgagccagtgaccacgtaggcagatctttctaagctgaaacactggtcttagaccgggaacgtattaaatcagttcaacagaccttggcaggcatcataaactcacaagaaactatgagactgtatcaacttggcaacacagagaaagcacgattcctacagagaccaggttgggcctccgaatgtacccaacaaacagtgaccatcggtttgtaataactgggaaccaaggggtagggttgactctggctcactaggcaaccctagggatcatgttcgcagcagcagggggatgatgtctgcaagggaccaataactaatagcaaaatggagatgccactcttcatggcaaaggcagccaaattgagaacaactagacaaggcaaagtgagagaaagaagctgcactgagtgtaatggattggtctaatgctgcttatattctaatgctaatttggatcccccaaaactgtttgcatgagtctgtgagtgtgagtgcgcgtgcacatacacacacacacacacacacacatatacacacacatgcaagacacactgagggaccctgccccccagttaattctgattggtaaataaagatgccagcagccaatagctggggaaaagagacataggtagggtttcgatttctgggacttggggccatgaagaaaaggaaggagaaagagaaagaaactgccatgggctaaggaccaagagagcatggcccagagggctgcttggttggagtcaagagaagcccagatggaacctagtaaataataagtaataactcagggttatgggatgggaaggtagattctaacagcacggaggttaggcagctgcctagccactgttctgcttaaggcatgttaaaatatgaaggttttgtgtgtgtgtgtgtgtgtgtgtgtgtgtgcacgtgcgtgtctttcatctggaaccttaaaagatatgaggcagatgaccgtactgggatttttaatattttttttacaacacgttagtcccttccagacaccacactgatgactgctccttcaatgctatcacacagaggaaagcagggcatcctttacaccttgagtaccaaccaccaaggagtaggagtttgcccccccaaaatttatatatatatatgcatgnnnnnnnnnnnnnnnnnnnnnnnnnnnnnnnnnnnnnnnnnnnnnnnnnnnnnnnnnnnnnnnnnnnnnnnnnnnnnnnnnnnnnnnnnnnnnnnnnnnnnnnnnnnnnnnnnnnnnnnnnnnnnnnnnnnnnnnnnnnnnnnnnnnnnnnnnnnnnnnnnnnnnnnnnnnnnnnnnnnnnnnnnnnnnnnnnnnnnnnnnnnnnnnnnnnnnnnnnnnnnnnnnnnnnnnnnnnnnnnnnnnnnnnnnnnnnnnnnnnnnnnnnnnnnnnnnnnnnnnnnnnnnnnnnnnnnnnnnnnnnnnnnnnnnnnnnnnnnnnnnnnnnnnnnnnnnnnnnnnnnnnnnnnnnnnnnnnnnnnnnnnnnnnnnnnnnnnnnnnnnnnnnnnnnnnnnnnnnnnnnnnnnnnnnnnnnnnnnnnnnnnnnnnnnnnnnnnnnnnnnnnnnnngaagaagaagaagaagaagaagaagaagaagaagaagaagaagccgccgcctccgccgccgccgccaccaccaggttatgttttgtagagctgcagagctgcagagtgaggtatggtgaggtgggaggggtgcctctgtgggcccatgctgaggagtcccttccctctgagggaccagccataagacaggtataatgtagaatagagtttatatgggaatgggaaggggggttgagaagggagtaaaggcagagagagggagaaaggggtgggggtgaggccggccaggaacacatggaaaggagtgggttggagagagagagggagaaaggggtcaggaagagaagggagtcaaagagaatgagaaagtgggaaatggggcaagcagccccttttatagtaatccaggcctacctggctgttgccaggtaactgctgggcagagcctagaaggaatgttaacagtgctcatatgttaaaagtttgggaaaaaaataaaaaaataaaaagaatgtctactttcttagattttagctttaaaaatatagagcttttggaatcgaaaatgccctagtatgtttccgtacgattgtttaatgggtacagccacttgctgccaagcttgacaatctagttcaagccccaggattgtgtagcagaaagacagagagacaggtgactattccaagttgtcctctgacctctacatatgtgctatggcatgtacaatatacatacacacagtaaggagtgaaataaaaaagtacctgtacccgattctaaacctttaaaaaatattgtcactttaaaggtaagttttgggagctggagagatggctcagcagttaagagcactggctgctcttccagaggtcctgagttcaattcccagcaaccacatggtggctcacaaccatctgtaatgggattcgatgccctcttctggtatgtttgaagacagatatggtgtactcatatataaaataaacaaataaatttttaaaaaaccaccaatgtgtataaaataaattataaaaaataaaaaattttggtaaacaaaagaaaacaacaaaagaccctcagccaattataccttcccataaagacaaggtcacaatagaacttttatttagttttagtacataattttttaaggaaacagaaattagctgggtatggtgatacctaccttcaatcccagcacttgagagatggaggtaggcagatctctgagttctacagagtctggtctacagagcccaggatagccagggctatacagagaaatcctgtcttgaaaacaaaacttaaaannnnnnnnnnnnnnnnnnnnnnnnnnnnnnnnnnnnnnnnnnnnnnnnnnnnnnnnnnnnnnnnnnnnnnnnnnnnnnnnnnnnnnnnnnnnnnnnnnnnnnnnnnnnnnnnnnnnnnnnnnnnnnnnnnnnnnnnnnnnnnnnnnnnnnnnnnnnnnnnnnnnnnnnnnnnnnnnnnnnnnnnnnnnnnnnnnnnnnnnnnnnnnnnnnnnnnnnnnnnnnnnnnnnnnnnnnnnnnnnnnnnnnnnnnnnnnnnnnnnnnnnnnnnnnnnnnnnnnnnnnnnnnnnnnnnnnnnnnnnnnnnnnnnnnnnnnnnnnnnnnnnnnnnnnnnnnnnnnnnnnnnnnnnnnnnnnnnnnnnnnnnnnnnnnnnnnnnnnnnnnnnnnnnnnnnnnnnnnnnnnnnnnnnnnnnnnnnnnnnnnnnnnnnnnnnnnnnntcactttagaagaaagtttcccccttagcaatgattggaaatcacggccagtgtcgatcgatcaaagtcccaagccagaatgaactgaaatacacagactccaaaccctgcaagcttcagacattgtgttagcatttgttctaggctctgcccaagttacctagcaacagccaggtaggtctgatttgctataaaaaggacggtttgacctatctttgctctctctgccccttttttctctctaacccctttctctcctttctcccctccccccaatattcctggctgcctccccccaccccccgtctctactcccctctccactccccatcccatgcctctaaataaactctattctatactagacctatctatggctggtgcttaggatggaagaggctacctcagcgtggacccgctgagacatccctcccaccccactgtactatactctataaaacataaccttgcttttataaaacatatcagtaaggctccccacccccatcacacccagagacaacttggcaccaagagttttgacacacctaggctcacaggaaatgcagggacaaaaaatggagcagagactgaaggaaaggccatccagagactgccccacctagggatctatcccacctgcagacaccaaaccccaacactactgctgatgccaagaggtgcttgctgacaggagcctggtatagctgtgccctgagcggctctgctggaccctgaccaacacagatgcagttacagccaaccatcggactgagcctggggtccccaatggagaagttaggggaaggactggaggagccaaaggggattgcaaccccaaaggaagaacaatatcaactaactggaactaaatcgacaaccaaagagtataatggctccagatacatatgtagcagaagatgaccttatctggtattaatgggagaggggaggctttgtcctatggaagcttgatacccaagcgtgaaggggatgctagagtggttaggtaggaatgggtgggtgggtgggggagcacccttatagaagcagagggaggggagtgggataggtggtttgtggaggggtaaccaggaaagggaacaacatttgaaatgtaaataaataaaataaccaataaaaaattcagtaaggatgttctatacacaactaacactccttcccccccgccccccaaggcttccttctctccttccctctaccaaggacttcatggggaaggcagtttgatgagttttaagaatattggaacctagcagctcacagcagcgggcacaaatccaggcctcctgcttgggggggggggagtttacaggctgtatatttcatttttacagtccaaatggctcctcaataattcatcatctgtgggatggagaaaggaacgataaaatataaatacaagtctccgctctccgggatggaggaaggaactctggaaggctgggagggaagcatcttatggcttcacaaaccaaacactgcacctgatccttggactcagtggcctcccaagggttgaagggacacggatatggtaagtggttcacagaactgagtgtgcccaaccagcctatcagagggtaagttcctgggaaagccttggtaactgtctcaagtgacacattttatctgttgccatttcctgctacctggacctaggtccctttaatactaagtttgagacctcatcccatgaagagaatgaagaagccttgccttccaggaagagaacagtcatgagttagcatgagattgagaaatagcacccaaaggcatgtacaagattgcagagagaaatacagcttgctcgccaaagactctcaccaggctctgtacctgccattgtctctctaggccccaggggatatttgcgttctaaagaggtttgtttgttcttattcttttttttggtggctttaagcctgattctcagctttcctaacctttctggagcctttaatgcagttcctggagttgtggtgaccgaccctcaaccaaaaattatttttgatgctactttgtaactgtaactttgctactgacatgtaatgtacatatctgtgcttttgatggtcttaggacacacctgtgaaggggtccttcaaccccaaaaggggttgagacccacaggttgggaaccactgaagtctatcagccacagtgcacagagttactttataagcttactttgacctcattgggaagccataacaattccagctgcaaggttaggaagagggctcagtacataaagggcttacagcagaagtctaaagacctgagttcaaccctgtaaaacaggctgaacaagatgaggcttgagtgcagtagggcagagggcttgcaagcccagggctggggaggcacaggcaaagggaccctggggcagacagctgagcctagttggagaagccaggtgccagcagagacccctagggaactgtgttttaattctcccatcaactcagtgggggataaacacaaatttctgatttggacacagagtgtgagctataaagacataagtacaattagtaagttgtaactaattatcagagcctagcttaacaatgttctttctccctctctatagccagcaacacaggtcaatggcatttctttaaccttttgctttgttttgagatagagtttccttgtgcaagcctcaaactcagtctgtagtagactaggctgtcttcaaactcacaaagactcaattgcctctgcttcaggggtactaggattaaagctaggttctaccatacctggcttcactggtatttctcaactctatccatctatatatcatctatctatctgcctacctatctacctatgtatttatgtatctatgcatatatgtatggatatacctatccatgtgtctatcttatctatgtatctatctaaatatctgtatatgtgtttatttatgtatctatgtatatactatctatgtatatatctacctatgtatgtatgtatgtgtgtgtatgtgtgtatctcacttgctctcttatagacagggtctcagatcctaggctggccttgaacttatgtagctgaagatggctttgagcttctgagcctcctactaaaattgtaagtgttcactaccacatcctaggataggagaagctaggtatggaacttagagctttgtgtttgctacatccccagcctttcagtagcacttaaatcctccaaggaaagtctttcttgggctctcttaacttaaacaaagcaaagagcatttgctcaaatgcaaaataagggacaaaggagagaaaataaaaaacaacaacaaactaggaaatataagaattctcaaagtttgctgctctccacatacatgaaagaagactcccaaggcctaaggtgctcggtcacttcaaggtctgttctttttattctgcacatgaccctaaccactatgggtaggaatggagaggaaaacagaagaccgtgccagagctgagacatacacatctggtttgaatgagaaaagttccccccacaggctcatgtatttgtacccttggctcccagcaggtggcgctgtttgggaaaggttatggaacctttagtgggttccataatattcctggaggaagtcatagccacacagggctttgagaatccataggcacaccttactcaagttttctcttcctgcttcctccatgtggatagagatgtgatctcctcagattcttgccctggctgcctgcagccatgcctcctctgtcattaaggactctccctccgaaacccataagccacaataaacacttcatagtttgcttttggtcatagtgttttttcacaacagtagaaaagtaaactaacatctcagttttgtcctctctccaaggaaaacacctctttgcctagtaaataacacatacagtaggcatgtgtcattaattttccagcaccgataacaccaagacacaaaagtagaatcttctcacttaaaatatcaaatatgagactggcatatggagcacatctttaaccccagcactcagaaagctgaggtaggtgaatctcagatttgaaggccagtctggtctacagagtgagttccttgactgacagggttacactgagaaaccctgtctggaaaaactaaataaaataaaataaaagataaaataaatgctatttctctcctgcctgtccaagctccagacatctttattaaccattccttttctttctttctttctttctttctttctttctttctttctttcaaggattatttaggggctggtgaggtgagatggctcagtggttaagagcactgactactcttccagaggtcctcagtttgatttctataactcacatggcagctcacaaccatctgtaaagggatctgatgtcctcttctggtgtgtctgaagactgcaacagtgtactcatatacataaaataaataaatcttttttttaagtcagtgagtcgtgactcccacctccaaacctttgcatttcaacaaaagacaatgcgtctatgtcttaacccctaggaaaaccagtgaatgatatatcaaggccactgacagacttctggagcaagaaggctcagtaagggtgccctcccatgtctctcctttcccatacaccctgagctgggataacttcctcagcaacgctggatcccttcagactcacaatcgaccatggcccctggccactctttaccagcccccttccactcctgcatattccgcttgcttgtttagccacccacaggctctcttttctctccctccatgacctgaggaccaaaagcctacagcataccactctgcatgaggggatgaggatgtccatagcaagttgtcaaaatgccatgttcagagataaaacccaataagcaggatgttatctgttagcagaaactccatggttatataaagtcatggtaacagactcatattctttcttaatttttataataattagttctagtggtaatttttccaacactaccccagcttttcactgaagacgtagagattcttcttttagtatacacacacacacacacacacatatatatatattacatatatatatatatattcaaattatgtatatatacatatatacatatacacatatacatacacatacacacacacacacacatatatatgtgtgtatgtatatatatatatatatatatgttgatggtacacctctgctatcacctagccatgccttgcctgaaagggggtgaccctatctagtctgtgaaaattgatgagtgtttaacatgtgtacatagactagcctacttgttatgactagagttctcagcaaagctgctgggcctaacaaagccccaagggacagaaccatctcagcaaatctgcagcctcagctgctgaaacgcccattcacatgtgtggctgaagggccacaatcacatgagaggtgttttgagtttgaaaccaacactacaaaattagtcagaacaactcctgcacctgcccaccaacaggtgcatagggacacctgaagcaccgaaaggcaaagtcatgtgactcaaagatttcatgtaagttgtcaaagacactgcacatgctgagggtgtcttgcctctaacttagagtgctcctttggtcttggtcatgcgggcacagacaaagagtaggccttagtctttggagttgttcagtgagatggtgacaagctcgggacgacgcatacccagcctgacccctggaggaagcccaattaagatgaaagagaagccaaccaaggcagaaaagctggtatatcagagaaatgagagtccctaaagattgtaggttgagaatttagaaacgctgtgattcctagacacaatcagtgatatctagtatcgccaatattttgtttgtttgtccttgggccgactgggtttgttttcctggtctgtaagcatccctccacagttgtagagtgtggtctccacagggcagctccaactgtcatactagcaatgctacccagatcacttctcatcccagaagtgcaaagaggggggccactgcctttcttcctgaggtcatccttctaagtaggattctggtttcacggtccaataagagagacataaatttgatactttaaagccctttaaaggaggatgttcctgatagaaatcaaaatcataagcaaatgtgaactgaaaaaattgcaggaaaaaaaaaaaaaacaaaaaaacccaaaaaacccacacctgtgttaaagattccataaggccaaatgactaaaattttgagataagaccttaaaatgttgcagactaaagccaaatgatctaagtcaggagtagtggagaaagaggcaggcaggtctctgtgagttcaaggccagcctggtctataaggcaagttccaggacagccagggctacactgagaaaccgtatcttggggtggggcagggagcaaattcctgagctatttttaacagctctgaaagccaatcattgcacagcttgcaatggacctaaggtctttataacttttgataagtttaaaacgaattctttgcaaaccattgctttcccctcacctaaaagctaagagcatcaccagataaccctggagccgatcacagagcccaccctacccccactttgctatgaacggcttaagtggggttcccagcaaagcgtgggatcgacaccttgacttacgagttcctttgttgtgtaactaataaagtttcacatgactaattggacagtgggtctcggtaactggggaaacgaaacctgtgtctcagggcctcagtttcccacattcggtgccagcatacattgtccccagtccctttgagatgacaactggttttgtgtcaacacagaaatcaaagaggcaaaccacagccatttccactcagagcctttagagctgtaaagaatgaacagttatgactaatatcaccccccaaataacccatttggatgtttgaatatttagaaattttgtacttccatgacatgtgaggtgagggttgatttgttctagatggggggggggggtgaggaagggccacagcaaacgaagtgtccttccttctaagacgctgaccatcctttataaaccacttagccaagctgcacagctatatttaggcagtaacaggctggggtgagctacatggccctggatgtggattctggaacaatttttcaccttgggagtctgccaagagaggccctgggatagacttcagacaacgctgactgacacattaaacagttgtggtcaggttgtggagacagatggccccaaaatagactggatgcagacctgataggctgtcttaactccttgctcatgtataaaacacacatatggagtctcaggaagggtcatgggatggcagcacacactagtcctagactcttagagttagactcttcagccagaagtttttgtctctacatacagctgcattagcaacgataccacatcggagttatctgaacttatttctagtccaaagcattcaacaatttaggttatcaacaggtggtgtgggtgagcaacttggttaacccctctgctcaacaaactgaacaccccgtgaggtagttcacattaggagacaaatgtagacaaggccaggggttggcctctaggaagacacatttccagatctggattaagaaaatgactagtgtaaacaggacagtggtggcacatgcctttaatcccagcactcgggaggcagaggcaagaggatctctttgagttcaaggccagcctggtctacagaaaaagttctaggacagccaaggctacatagagaaaaccttgtctcaaaaacaaacaaacaaacaaaaaaccccaagcaaacaaaaaagactagtacacagattgtgtatagccaactagttaaacaaataatgggaacagagaatagcatcctggaagaaacactaaaggccctgagttgggagaacaagacagagctccttactcttcagatatctgtcatgctccacaatgtctgtctccctctgtcctttcccgctacagcccctaccctcttcccctgtgtcctccagagagcgactgcagtggcccttcctctcacgcacccagtgtgttgtctcaacacatcacattacaagactaggaaacctacctaccttccttccttcctttctttctttctttctttctttctttcttccttccttccttcctttcttttttaagatttatttattttatgtattgtgagtacactgtagctgtcttcagatacaccaggtgagggcatcagatcccattacagatggctgtgagccatcatgtggttgctgggaattgaactcaggacctctggaagagcagctagtgctcttaaccactgagccatctctccagaccggaactctttcttgaaagaaccactttccccttaggtagttctagcactcaacaaagagacttggggaccggaatcgaagttggacaagccagtccaccgactgcagccacctttcagtctgtctccaatactactgcgagcaaaatgctgagctaacagctgttgaaagaatgaacagctggctacaagcacccagagaaaaacctcgaagaaaagattagcaataactgtgccccgcttagtcctctctgctgagtggctgtggctcaggatggtaaactctcagttaccactccatcgccgtgcctgcctgcctactcttatgcctgcccgccaccatggcatatcactaggctcatgaactgaaaccccctgaggttggaatcccccagcccactcttctataagtagttttggccacagtgtcttatcacagacatagaaaatgaatgaagacggacatcttaatttttcatcttggcaaagcttcaggtgtaatcaagtccaggcaaaaaggtccaagatatcagagagccatgttggctccaaggaggcgtccaggatgtcacttggggccatctcacctaaatgaggggctaatgagcaactaacgagttttgtttttaagaaccatccagtggccaggcggtggtggcacatgctgttaatcccagcaagggggaggcagaggcaggcagatttctgagtttgaggccagcctggtctacagaataagttccaggacagccaggactatacagagaaaccttgtcttgaaaaaggaaagaaaaaaaaaaagaaagaaagaaaagaaaagaaaagaaaagaaaagaaccatccggtcagcaaggaggacttacaattagtgcccatggttttaattacccagaattcttgttcaaaagctgatttacccaaacctcttcagttcttaattatgtgggatctgcaagatctgcttaatgacttgggacttttctgttgtttttaatctgtttaagtagttttttttttttaagtaaatttgttcttagacgttctacacatgtacacaatgcctactgacacctacctctaatctaccccatccattctccctcctctccatgaattatcaagttcatgtctattcattgtattttgtgactctctgatattaaccaagctggataagcaaagctggacgaccaaaggttttgagttatccaccagacctgataggcttgtctgagggtttacaactaaaaataacgatttccctttcccccagaatctaaaaaaaaaaaaaaacaaaaaacaaaaaaaacaaaaaacaaaagtaaaggagtaataagtcctgcccccttcatgactgagagctgataggaccagtcttgtggctgcaactttgaaagcaaattcccaggtgctaatgtggaaaatcaagaaccacatagaatagaacagttttgcatctgtagttctttgtgtacatctaaacgtgtaactttatgaacaagagatacctgggataacacagcaacgcatcaatggttaacttgtcttgagtttcggctgcaccgtatttctttaacacgctgatcttctaatgagtacacagccacgctctaatgcgcacacagcgctttccttggcgtaggctctgcgttagttttgaaacagttcagctttacaccagctggcaggatgaaagccgtcttcattcctttgccgagcatctgccaacacggaacctgttccactctgttcccgcttacagggctgcacctgtccagagaggggagacagaaagggacccagccagctgatccagcgcactgcaccgcaccccccaagggagagcaggtgtgtttcttgtgcctccgccttaccctgacttgttaagtgcttagagacaatgttgtgtggttttggccaagggaaagctgcacaaggctgaagacggagcagtaacagccgcagctgtgggcttgctgcaaattaggccaatgttttcttatatttatttacttctgcttgcgctggggatggaactcagcttcctcgtgccaggcaaggcacacgctctacaactgagctacactccttagtcaaagggtttgaagcaagtcagctgcaggcatccttgcgaagacaccagttagtacttatttctgtttaattggattatgtgtaatttttaatttttttcctctcttcctaaatgtatcagggtaatagagctgttacagtgccaagacatagttaacccttagacctttaggaagacaccataacctataagggtaaagtaggggctttccccagttagctcagaggcacctgcttccagagtgctcttggcgcagtgagtgaacgcctgtcaaacgtgcgcaccctgatgcaccccaactgatccctgaggtcagcctttcaagccagctgccagcttagtcagtatctccacttggcaaagctccaatatggcaaagctgtattgaagctaacacagctccgcgcccgaaatctttggaatctccgcccacctgtgtgaacgcccctcccacagcttccctttccttctaagtaggcatctgtcaattacccatttgctcagccagccctttgagaagcacccacggagagtgcgcattcacactgccaacgggtctgcttttgtcggtcttaaaaatacttttgagtattccagccagttcttaaaccttcaggtctgtggtgattcaccttattccatttggagcggccagagcggaacggagattataaatctccacgtataaataacaggaactttctttgtgtccctatgctacatctctactcaaaggaaggcagaaggagaagaaagaaagaaagaaagaaagaaagaaagaaagaaagaaagaaagaaagaaagaaagaaagaaagagggctggtgagatggctcagtgggtaagagcaccctactgctcttccgaaggtccggagttcaaatcccagcaaccacatggtggctcacaaccatctgtaacaagacctgacaccctcttctggagtgtttgaagacagctacagtgttacttacatataataaataaatatttaaaaaaaaaaaaaaaaagaaagaaagaaagaaagaggacaacaaccttgtcccacaagccttttcacgagggctcctattcatggtacaatcccacctcacaggcaatgccaccaaaacgtttattgacaacccctgagtttttacccacagtcttataaaaacaaacataagatttgtagctaaggggttggagagatggctcagaggttaagatcactggctgctcttccagacatcctgagtcaaaacctagcaaccacatggtggctcataaccatctgtaatgagatctgatgccctcttctggtgtgtctgaagacagctacggtgtgcttatatataataaataaatcttaaaaaaaaaaaaaaagatttgtagcaaaatcaaatttcacatgaaccatgccttcaactacgacagtgaatgaggggataatcccaaaattgaactccttgtagctcgacaaagccttgagcataaacacaggtgtcttagggttttatcgctgtgaagagacaccatgaccaaggcaactcttagaaaagcaaacatttaactggggctggcttacagtttcagaggttcggtccgttatcatcatggcggtacacaggcagacatggtgttggagaaggagctgagagttctacatcttgatccaaagactgccaggaagagactttcttccacactgggtagaggctggacataggagccctcaaagcccacctacacagtgacacacttcctccaacgaggttacacctcctccaataaggccacacttcccaatagtgccactccctgtggccaagtattcaaacccatgaatctatgggggccaaacctattcaaaccaccacgacatccaagacaccatcatatatggtgtagtgcaaggaagatgagtgcgaccactcagaacacagacgtatgtacacagatgacgtaggatgtagacgtgtgtcatcctcagaaagaagttctgatagggagagattaaacgctgaagactttctggccaggaaatccacagcactcaatatgggaaacgggcccaagatagaggtcagaagccttagagaaccttggctggggcggggcctgggcggggcctgggcggggcaggaaggtactgatgactctcagctgagttttatgaagggaaaagaggggaacattaagaatactaagaaaaaggatggaccatgtagagactgccatatccagggatccaccccataatcagcatccaaacgctgacaccattgcatatactagtaagattttatcaaaaggacccagatgtagctgtctcttgtgagactatgccagggcctagcaaacacagaagtggatgctcacagtcagctaatggatggatcacagggctcccaatggaggagctagagaaagtacccaaggagctaaagggatctgcaaccctataggtggaacaacattatgaactaaccagtaccccggagctcttgactctaactgcatatgtatcaaaagatggcctagtcggccatcactgaaaagagaggcccattggacatgcaaactttatatgccccagtacaggggaacgccagggccaaaaagggggagtgggtgggtaggggagtgggggtgggtgggtatgggggacttttggtatagcattggaaatgtaaaggagctaaatacctaataaaaaatggaaaaaaaaaaagaatactaagaaaaagacaagcaccccaaggcaccaaacgttcctttccctccttactaccacaagaccatccagtaagagaaccgtgttgtacgaattagtgtgacctaagctctcgacctaggagcctgaatcagtcagggttctctacagtaacagaacttgtagaatgaatcccgctgtgtatattagaaagggggtttaattcgaatgacttacaggctgtggtccagttcatccaacattggccgcctatgaactgaaggtccaggagcacagtaatcattcagtccacaggactggatgtctcagctggtcttcagtgcaccccagaatcctgaagaagtaggctctactacaggtataggaacagactcgctagcaagaaaaaaagcaagcaagtcaagagcaagaccgtcttcttttggtttggccttatatttttgttttgttttgtttgcttgttttcaaggcagatttctctgggtggtcctggctatcctgaaacttactttgtagaccaagctggcctcgaattcagagacccctctgcctcaggagtgctgggagattaaaggcttgtgcaacccagcaaaagctcgttctatctatataggcttccagcagaaggcatggtccagattagaggggggtgggtcaccccatctcaaaaaacttggattaaaggtgtgcctatctcagagatccaggttagaagtgaaccttctcacttcaaattaagcagaaatcccccacagaggtgcctcatttggtggttttagttcattccagatgtagtcaagttgacaaccaagaacagacatcccagagccctagcggggaactcagagctgtaagcagtcagcttctgtacaaaagcctttagaggccaaaaagggaacaagacgcaaacatttcagccaacgaaacaaggaagtcctgaagcaaaatcaaactctaacgaagcatcacaaatcaacaagatgttcttgaacaaatgaacaaatactcagaaatacataaaaatcaccagaaatctcaaagagagagctggcaagatggctcagccagtgaagacatttgctgccaagtctgaattccgtaggcaggactcacgatggaaggagaaaactcagatacacatgcatacatgcacacactctcttccacacaagcacacactctcacacatacacactcttgcacccacacactctctttctctttcacacacacacacacttctttttttaagatttattttatataaaatatgtgtgtgagtgtttcacctgtatgcatgtaagtgcacagcacgtgtgcctcctaccctcgcaggccagaagagggcatcagttcccctggagctggagttacaaatggttgtgagctggcatgctggcactgggaacagaaccagattttctgcaagtggccttaactcctgagtcatcctccggccccagattactacagagaatactgttgagagaactaatggatattaaatgtatagtgaagatgacatagcaatctagttatctgttttaggtgtcctgggtttctcacagcccgttcaaggtggaacaagcaagccaggctaccttgagaagaataccaggaggagagactagtcacaaatgagataagagaggaaggagcaaggtctatggacaacatcagagaagccagtcatcccagcatttgcaggccactgggagaacagagaccttaacatggctttactctaaaagactgggttttttattattggacttgggttttagcactaactaaactagcccacagctattctgagcccggactgcagagaagctagcaaggaagtgatacagggcaagatttttttaaagagggaagacacaaggtcaagtgaagtgttggagcctgcaccggaaattaaattgctgatgggtggagtagatcccaggtgccagaaagagagagagagagagagagagagagagagagagagagagagaagagaagagaagaggagaggagaggagaggagagagagagagagagatcttggactctccacctgagcagctagcaacagggagcaagcagtcaaggagccgagccaggaacgaagttggcacccttcctactgggggctgtggtatggtagctgttttcagaaacagtgatctgattatgttaagctgagcctgccagttaattagccaaatgaataaatagagatgctctgaaatgctggtccttttgatcttggcgtgggctgaacctggttgatggctctctctacaaaccatactccccttccatgatctgagcaagtcacatgaactattagtgttatctgtgtgtgatggcagaaacagtaaatggtgaaataaaactgatggcctggggctagagagatggctcagtggaaaagagcactgactgctcttccagaggtcctgagttcaattcccagcaaccacatgttggctcacaaccatgtgtaatgggacccaatgcccttttctggtgtgtctgaagatagctacagtgtactcatataaaataataaataagcaaaatgatgggccaagaaataacctgtgcagatgactctgtgagtgtgtgtgtatgtgagtgcatgtatggtatattgtgtatgtgctgtgttgcatgtgttgtgtatattgtgtatttatgtgttgtgtgagctatgtgtatatatcatgtgttgtattacacatgttgaatgtgtatgctgtattgtatagatgttgttgtgtgtgttgtgtgtattgtgctgcgtgtgtggtatgatgtgtgttataccacattatttggtatatggtatgtgaccacatccacactatttggtatatggtgtgtggtacaatgtgtgttatacacacatacagtgtgtgttttgtgtgttgtatgtgtagcgaatgttgtgtgtgtatgtgtacccactgcactttgtgaattcagaagtgaatggacctggcatggtgagaggtttctgccactcctctctcacctgtagcacacccctgaggagtgccagtgtcatagttagggttttatttctgtgaacagataccattaccaagacaactcttataagaataacatttaattagtactggcttacaggttcagacaatcagtccattatcatcaaggcaggagcatggcagcgtctaggcaggcatgatgcaggaggagctgagagttctatatcttcatctgaaggctgctagcagaatactgacttccaggcagcaaggatgagggtcttaaagcccacacccacagtgacacacccactccaacaaggccacacctcctaatagtgccactccctgtgccaagcatattcaaaccatgacagccggcataatcttcattagcatcacaaatgtatttacgtgttctttccctctgccactagattgtaagccgctgcataccagagagggtctgtctgtcgctctctattagcctcagcacccaggtttgtctgatgaatagatacaccaagagagcctagcacagggagggcaccaacctttgaagaactcactgtggcagacttcatgtctactgagagctttaagcaaatatctccattaacagtcaatccattgagactgtcctaagagcattctgctctcccattcggatgccccttgccgcctcttctcactcccaacctgccatgtgtgttctgttttataacacggtataatagcagtgggagggagtatcttggtgagccctgccaatatgtctccctgagggatcttgccatatgacaggcctatttattagggggtggggggaagggaacagggacctggcgatgtgaggaacagagctatgagggcagagaagaggggagagagaaggacagaaagaaatagagggagagagggagggagactggctgggaacacaagggaacagagagagagagaaaggaaggagatggagagagttagggtatctagcagtcttcttagactgcctggctcgcacctggaagcaggtgatgacataagctgttgctaggcagctgttgggcagcgcctcgtggaattgtctgtaagccaacaatgtgcttctaggtcctgaacctgggtttttccccacagcttccttgtttaaggacaaacccccatttcagaatgtccttgcatttatcatcaagaactacttcgttcataaaaacaaaacaaaataaaacaaaaccaaaagacatattgtgcatttgttaatattgacctctttggaatatttttaacttaaagggcgccactgtgtcttggagtttcttatgctggcatgccttccacagaatgaagtactaagtccacagtgagtgctctttgaattgctcaactgttaatccctgcagacctgccctgtgccaagaagcaaatgacagccacataggtgggcagcctagcccattgcttgagcatgatgctggctcccttctgcctcgttggctcactgattctgcctcttctttctctggaaggaagggccatcagggatcagtgggccttagtgctctgggtgtaagccagacacactgagtgcatatagacacactgagtgcattatagatacattgagtacatatagacacactgagtgcattgtagacacactgggtgcattgtagacacactgagtgcatgtagacacactgaatgcatatagacacactgagtacatgtagaagggaagcaagcagcacctgcctcactttagcccttgagagaggagactctgtcatttaatggtgtggactaattagaaaaatgccaaaggacactccattcacctgtgtagatttggccatggctgtcactcaaggtacacatttctttgcccacgaaccaatgctgatgactcaagatggcaaatggtgcagcatctgtctcctgccaacagctaccaccacctgccctccgtgaggctgatgccacatctctgattgacaagcatataactgtgcttcactggttttcttccttcttgttgcctcttttatatccactttcacctacatgttttcttccctgggacctgcttattttccttgagcaaactccatcatgaaggataagaaagaacaagcctaacaatagtatttaaagaaaatactgctagcgtaatgcaaacaacgtatatccatatgtgacccacaggtatagtcaataccagggcccaagtgaatgcaggcatactgggatgctaagatgtctctgtcaacttgcatggacttgggattacctgggagatacatctctggacctgtccacgagagaagattaactgaggggtggggtgtcctgaatatgagtggtactatcttgtaagctggggtcctgggctaaattttaaaagacaaagaaggagaaggagggcaggtaaggatgaggaggagaaaggaggaaggagtaggaggagggaggaggagggagagaagaagaagtaaggaggaggaaggagggagtaagaagaggagaagaagaaggaaggaaggaaagaggaggaggaagaggaggagaaagcaggggtcctgggttaaatttaaaaagacaaaagagaagaaagaaggagaaaggaggaggaaaagaggaagaaggaggaggagaaggagaaggagaaggagaaggagaaggagaaggagaagaagaagaagaagaagaagaagaagaagaagaagaagaaggaaagaaagaaagaaagaaagaaagaaagaaagaaagaaggaaagaaagaaagaaagaaagaaagctgagaacaagcattcagctctctctgactcctaattgtgaacacaacatgacagtccatccctgtgatagactagatactctcaaaaccatgagtcaaaataacccttctctttgttaagttgcttttgtctgttattttgtaatagccacggaagagcaacatgagcatattcatgcacactggcaggcgcatcataacttaaaaggatcctgctactgatggagcattcgactccctgtctgtccaagccagatgttactggtaagtcacagcacaatcacgctgcgcccacttctccccatctagacctattccttgaggttggacagtgtttttcttctgattgcttgttccgccagagtgatgaactcaaccctaccccttaaaccttgaccttttctgctcttcattctttgcaactccaaacactgccttgctcgctcttctgattgacacaattggggtgcatttgaaagctgccagaagtaggcgctctgctatacaggagaccagagagatagcatcctagtcactgaaatatcaccccacccctccccccacctcctccgctgctctctttgcaccctaatcagcttaatcccatccccagattgcattttagtcagatgaacccccaccaaatgtcccccccaacccaccccccccccgcaggggttccattcaaacacggagctatttgttagttaagtgagcacatttcaaaccctgcagccagaaggaaaagccagatgttcccttgccattacaaggtgtgacacccaagcacgcaggtccaactttccttccaccgcacttggacctggtaatgagggagggaatgctagccctctcaatgtggcgggcaccctgacatacacacagcctgggtcactttatatttggtgttggatatctcctccaaaaatcgccacccccaggtaccaatctactctctccagtaaaatctgccttagctctccatataaggtttgctactccccttaaccctttctggtagctcttctttctctcagaaattcaagtgcctatatccccctctttccattataaaaatggattcatcgatggtttagtagacctatttactcaaaagtgcaaaaaaaaaaaaaaaaaaaaaaagaaagattctattttattttgacttttaaaaaatgttttaagggatgggaggatgggccagtggttattggagatcacattgcagaggacctggattcagctctcagcacatggtgactcacaactgtaactccagtttcaggggatctgtcatgttttgacctccagggacaccgggcacatgggtggtatataaatacacattcaggcaaaactactcatacactgtaggggtccatgatttgccgaagaatgacaccctgaactcaaatcatatgtaaacgcaaagattattttattctgcataaatttggtatgctgcggtctcccatctccaagatagagagacagccacgtgtgctctcaggcctgatttaaagcgcagtaggggatcctgaggagtaggtcacatttatcttgctccatctctagagactttccattactgaggtgtgggggctggaaactgttgttgaggaagtctagaaactgctgctgacccattgtccttgcctcaggccaggtggaggggcagcttctgaggcctgggcttgcctgggcttaggccgcctctctcctgaactgtcaatttgaggcctgtcatggagtcagcctagccttctcaacatgtaaaaattaaattaaaaaaataaatctgaaatgtgttttgattgtctcatattaattagacgtaagaatgggtttcaatttgacatttccatacatgtacataatgtattttatagtttcatgcatgccattacatgattttactcctacccccacccatgctaaccccctcccccttcttagtcctactctagtgcctttttaaacatttaaagcaataaataaaaaataacagtgtctgagcaccagtgcgtcttcagtagaggtctaggatagtttaagtgagaaatgtcccccataggcttagacatttgaacacctgctcacctcttggtggcactgtttggggaggctttggaggtgaaccttgttggaggaagtatgtcactgagggtttaagtgccagcccccatgtcaccttgagtcgaggctttttattcactctgtgtaagctagttctgctcacggtaatgctaattgtaaggctgccactgatgtgaatttttgttatttctgggctgtggatgggtgctacggatggtcatagaaactctgactccctctgcagtccaaaattaattttgtatctgtgcgataaaaatggaagggagatttttttttaaaaactgtgtcatttccatgtggcaaagcagccaccctagtggcacctgtcccagctgccaggggatctgccgcttgtatctagggccacgtgggtggctgttaaagagcccatatggaatgatgttcacttcctgaattccaggcaaacagctggtggactgtcttccaactgtctttaaaagaaaaaggcaaaacagttagaaagtccaggatctggcaggtgttgtgagcctgtgggaaaggtgaaagggcacagagagagaaacaagcctgtcttctcgggtaatggtgacagtggtagtatagtaatggagacatacccgagaatatggaataaacccttctatgtttgcaattaattctcaaacctaaaggatatgtagaattcctgtcaagaactgtgtagtcttttgttttgttttatcaggccaagatgttgccagtcattaaaagcagagtaagtagccgggcgtggtggcgcacgcctttaatcccagcactcgggaggcagaggcaggtggatttctgagtttgaggccagcctggtctacaaagtgaattccaggtcagccagggctacacagagaaaatctaaaaaaaaaaagcagagtaagtgaggccagagatacagtttagatgctaaagtgcttccttgcaagtgtgagaacctgagtttggcccttagcggccgccgtgtaaagctgagtgtggacttgcagacttgcagactcatcgctggagaggcagaggcagatgaatcactcaggatctctggccagtaaacctactctgtgtggcgactttcagatcagtgagggcccctgtatcaaaaacacaaggtggacatttctagttgaaggacagcaaaggctaatccctttgggctacatgcatgtgcacatagacatgcacacacatcctctcatttgcatgcatctccacatctgtgaacactcacgcacaaaagcagaggatgaggctcagctgtatgagaaatccctgtgcattagaggatgaaagggaaacacattgtgccagtcaaggttctctagaggaacagaacttagagaatgaatctctctgtgtacacagaaaggggacttattaaaaacgacctagcggctgtggtccagctaacccaacaatggctgcccatgaatcgaaggcccaagaatcctgtagttgttcagtccacgaagctggatgtctcagctggtcttcagcataagctggaaccctggagaaataggctgggatgccagtgaaggaatagacttgttagcaaggccagggcaggcaggaaaagaacaagaccggccttcttccttgtctttatataggcttctagcagaaggtggggcccagattagaggaagttcctctcacctcaaaagacctggattaaagctgtgtctttttaccacagagatccagtggatcttcaacttaagcaaatactccctcacaggtgtgccccatcttggggtttaagttaattccaggtgtagtcaggttgacaactaattttgtgtcaacttgacacagctggagttatcacagagaaaggagcttcagttgaggaaatgcctccatgagatccaactgtaaggcattttctcaattagtgatcaagagggaaaggccccttgtgggtgggaccatctctgggctgatagtcttgggttctataagagagcaggctgagcaagccaggtgaggcaagccagtaaagaacatccctccatggcctctgcatcagctcctgctttctgacctgcttgagttccagtcctgacttcctttggtgatgaacaacagtgtggaagtgtaagctgaataaaccctttcctccccaacttgcttcttggtcatgatgttttgtgcaggaatagaaaccctgactaagacaacaaccaagcataggcatcacacacaacatggtcagcacctgaaaaacagagagggtaacggaggacaaaaagacaagctgttgcatatgtgaactatctttgtcttcactgattgtactagtatcccagatgaagagaatttccacctatttccagtttagaaccatgcatcactcattcctgacagagagagatagagagagaggtagggagagggatgactttaagaagatgtaaaggggaggagctagagaaagtacccaaggagctgaaggggtctgcatccctataggtggaacaacaatatgaactaaccagtacccccagagctcatatctctagctgcatatgtagcagaagatggtctaataggccatcattgggaagagaggccccctaggtcttgcaaactttatatgccccagtacaggggaacgccagggccaagaagtgggagtgggtgggtaggagatggggggtatggggggcttcccgggatagcatttgaaatataaataaagaaaatatctaataaaataaaaaaaagaaggtgtaaaggggggctggcgagatggctcagtggttaagagcactgactgctcttccagaggtcctgagttcaattcccagcaactacatggtggctcgaaaccatctgtaataagatctgtttccctcttctggtgtgtctgaagtcagttacaatgtatttgcatgaaaataaataaaagaataaataaatctttaaaatgaagagagagaagaaggtgtaaagagtggcaggtccttgtccctgtggcctgttcagactgtatcaaaacaccacaaagtttctgagtgccccagggaggcattccaaagaagcagaattgtttctaagcttccaaggcaactctcttgattctaaagccttctactaatgtctggccaaacttcctggaagaggaaaggacaaatggaaactcataggcctctcatattggtagacactgaaaatacagacctgtttggtaactaattagaaattggacttgcagggaacctaggtacctggtgtggcagtaatccaaatttcctaagaatgagcctgtcacttggtgatggattgcactggctggtcagcagggaatctacctttacccaggagctcctgcaggcaatcctttagtcaggttgcatctcggtgagttttacaggttctgctctcccaaagttaaaagacggatgccaagtcgggtatggtggtgtacgcctttaaccccagcactggggaggtggaggcaggaggatctctgagtttgagaccagcctggtctacatagggagattcgggacagctagggttgtggggcagccaccagagaagactgcttggacctgggtttaagccaatagagtgtctttattaactggctggtaactatactgggtgctcaggaacccagtgttgcccccagcctttctcagggtgagatttaagcaccaaaaccatgctctgggttgacatacttcagtgaacaagaacagtgagacagaagctgaactacagaagccaaaagcaaggttagaacatttagaggctttcctagaactatagactttgatggattaggtctttgttttagttttggcaggtggtgctgtctacatgctgagttttacagcctgagtggtacttctatcatgggagtcaattgtgctaaggtctgagagcctactaaggtctggggccctgttacatacatatacatatacatatacataaacatatacatatacatatacatatacatttgtgattcaacaaataccctttttttggcagcatatatattttttgctctatctgaataccctgaaactcggcctgctcccctctcccctcatgtctaattcccaggcaagccttcctcaacctgaccttcaaactgtacctcgatgtctccacgacataggttctaagtgaagttatcagtgcttcttgctcaacccaaggcagaagaagctcctgtgtcagggttctctagagaaacacaacccagaagacatgcattaatagacccatagccatttaggaacatgaggtgtggaggagggacggagggagggagtgcacagggaggaagggagggagggagggagggagggagggagggagggagnnnnnnnnnnnnnnnnnnnnnnnnnnnnnnnnnnnnnnnnnnnnnnnnnnnnnnnnnnnnnnnnnnnnnnnnnnnnnnnnnnnnnnnnnnnnnnnnnnnnnnnnnnnnnnnnnnnnnnnnnnnnnnnnnnnnnnnnnnnnnnnnnnnnnnnnnnnnnnnnnnnnnnnnnnnnnnnnnnnnnnnnnnnnnnnnnnnnnnnnnnnnnnnnnnnnnnnnnnnnnnnnnnnnnnnnnnnnnnnnnnnnnnnnnnnnnnnnnnnnnnnnnnnnnnnnnnnnnnnnnnnnnnnnnnnnnnnnnnnnnnnnnnnnnnnnnnnnnnnnnnnnnnnnnnnnnnnnnnnnnnnnnnnnnnnnnnnnnnnnnnnnnnnnnnnnnnnnnnnnnnnnaagtttttattcatttatcacattgtcgaggcagggtctctcatgttgcttctgatactctttatactccatgcgagctgacccatgagctaattctcctgtttctcatctccctatgagagcactagaattcttgatctatgtgactgtatgctgctctaacatggatggattctggggcttggattcaggttagcaggcgtgggtagccagcactagattcactgagctgaacgattcatttgatgagttttcattgtgtaactgagtgtgtttgctagtgggttatgtgcatgaaagtgcaggtgctggtggagacctgaggcctctgaggtgggactacagaaaggctgtgtgtctcttgatgtgggtgccaggaactgaactctgatcctctggaagagcagcaggtgctctgaagtgctgaggcatctctctagccccttagagtcctggttgtcctagaactcgctctgtagaccaggctagcctagggttaaaggcatgagccaccatcgtctggcccagggcaacatgttttaactgcagtgtgtccagttgtttacagtggtgttaaagtaatgagagcaggcaggtgttactggagtatcaaaggaggagcccttctaacaatctcccatccctaactgaaggctcatggaaggccaaatctgtttcctctacttcaacaggagcaaaatctcctggatgtcagagaacatgacttcaaagtccttagtggaaaacacaccacgcttctccttaaatttcattttcttccaaaaatttatttttcatcaagagatatattggatgggtttatatattttaagggatagcctttaccttcaaatatgataaatattaataactagaatgggcactagaaacgaaattgctgagtgatttttgaaaataccacaatgttctaagacaaaaaaaacaagaccaagacaaaaccaaaacccaaaacccaaaaatccaaaaaaaaaaaaaaaaaaacccaaaaactttacacacctcttgctgggttacttgtctctagctgtgaccaaataactgacaagaagcagcgatggctccactcgccacagaagcccaggctcagcagcagctggggaacagaggcattccctgtcttagcctttgtgtttactgtatgaggtccagccacataggcaatctgtttgactctgtatggattcaaatgttaaagctgcctataaaaccctaacaaacatctagataacacccctgcccagatccctggacaccccatatcccaggcagggtgacacattaaagacaggaagagctcaaggtcattttcaggtacatagcaagtttaaggccattctgagctgattgagactctgtctcaaaaggaaaggaaagaaggggcaggcatcttttatcatagcctatatagaaaacccagtagggttcagaactgtccaggcttccaatgcagatgagagattgtgatacgattagttcaagttgcactatattcaaagagcaaaggctaggcaggcttcaggtggcagctatgagttctgggagccacagcttccagaagcagcacatcagggcaggaggctcccctggccttggctccgagcacatttgtaaagcagaggggctgtggttgaagatgaaccctgattctggcgctcagatagcagcatgtgtagcctggaggcaagccaagataccttccaaggctgggatatctactgctgttatcctcagggatcaatcttagctctgaacccgttgccatggagaccatctgagtctatgtttttcccttagtgatgttcaagaaagcctacacacatacctattcagaaaatattctaatacgtgggctcacatcagcataaatgactatgtcctttatagaaaacaaaagcaagtgtctggggaagaacatggtgggagccagtctgcttccaaactgggaaagaggttggtagtgagaaccacctccttctacacagcattctgctgttctgatttcaaataaaacctgtttatattacaaaatatggaaaaatgcataaaacccaaaaggtaaaccttaaaataaccacactcatttttctttttatggatatatatatatattcctcctatttctaggacaaacacctttatgaatttggtctgtcagtcctgccaatttctcttatttttatatgtctatctatttacacatccatctatccatccacctacatgtctacttatcctttttttttttttttttttttttaattttgaggcagggtcttgctatattgcccaaactggccttgaactcttgaactctaagagatacttctgtaggctcccatgactacaagtacattccatcgagctcagcacatctatttatttactgatttatctaatacttactaagtcatgaccttggtctgaacactgtcctaggcatctgcaggtcattgataagtaactgtatctattacttccctattgctgtaataaaataccataaccagaagcaacttaccgaagagattatttgggcttacagtttcagaaaggtaatagtccaccatgggaggggagcagcaaccagcaagaacaggatgctacaacacatctcaaaccagcacacaggcagtggtggaacaagcctttaatcccagcacttgggaggcagaggccagcctggtctacagagtgagttccaggacagccagggctacacagagaaaccctgtctctaaaaaccaaacaacaacaacaaaaaacaaaaaacccagcactgagcagagaaagcaaacaggaagtgaggagagactatagacactcaaagcctgcccggcccccagtgatgtacttcctccaacaaggctccaccttcaggaggttccatattctccctaaactgggcggcccactgcggaccaagtgtttgactacctaagccggtgaggtgacgttctcatttgaaccaccatagctacaaaaaagaactcatttctcagacatgttatagtctcgtaagagaagacaggaagttatcagcaaacacaactactgactagtgagaaatgctctacagaaaagcatgcttagaggacccattgaaaattgacctagtggagactgagacatactcctgggaccaggagcagtagagaaagaaggggccttaacgataacatggaaaggagatagatgtgtctaacctgtgactcacaggccacacgtatctcagaatagccataacgtggccccatgcatttggagatggcagcatctcatcacaaaaggccgaatctacagcctgttgggaatgaagggggaacaagaaggggaagcagttgaagaggtgagccacagacaagtcacagattcgggaaaagaaaatgccagagaaacgcgaattttaagacgctgagttttaacagagagtggggggatatgctctgttggaagagatttagggagaaggtcagcagatctcagcaagttcattgtgtaagtaggataggagtgcatggcccaggctcttagtggaggataaccctggggttcagtgtgtgaaagcatttgcaagctcacacacacacacacacacacacacacacacacacacacaccacacacatataccacacacacatataccacacacacacatataccacacacacacacacacacacgaatgttaggatatctcaacaccttaggattactgtattttattaacctcatgattccactctacaaaattcgaaatcactgtggtttcaagcgaacaatcatagcatactgaccaagaaacaacatgtttaggggttggaaagagactgggcaattaggaacactgggtgttcttccagaggacccaggttcaattcccagcacccataaggcaattcacaaccgtctgtaactccagttccaggggatctgcaggccaaacaccaatgtacataaaataaaaataaataaatcattttttaaaaaagatgatgcttaaataaaagtcctatcgaagacctacacatttaaattgctttacacgaaatgaatgaaaaccaagggcttaacctcatggaagctcatcatgttgagagtgacactgggggtcagggaagacattgcagtccccacagcaaaaacatggcattactgtattctattataattccactttacctcagaactgggctgcaggtgccaactgccaaaggaaagcaaaaaaatgaagatgtcaaaaatgctcatccctgtgctctgcacagaattgctatttctttactgttcttttctcatttatttgtggggctttttttttttcttttgggcgatgtttttgagagcatgtgtgtctgtgtgtacgagtgtgtgagtgcatgtgtgtccgaatgagtgtgtgtaggaatgtgtgcatgcatgtgtgcgcacacatgacacagagcctgtgtggaggttagaactggttatcttcctctttaagtgtctctcttatttctattcctgtgctgtggagcccagactagaaggcctccagcttcaggcggattctcccatctctgcttcccatgtcccagtgggagtgttgagtttgcagatgagagtcacaggatcagggctttatgtgggctctgagacatgagactcaagtggttttacccatggaaccattaccctggcccccgacttactgtttctagaggtagaaactaaaagtactgctgtccgtcaggctgtggaggtggacttaaatcccagcacttttgaggcagaggcaggtgtatctgttgagttcaaggctagcctggcctacagagcgagttccagggcagccagaatacgcagggaaaagctgtctggagaaaacaataacaataacaaaacaaacaaaagagtcctgctgtcaattaccatgaaaggccagtttagaaaatgctacaagtatctgaagaaaaccaacgccatacagaacatgcttgatcaagtcccaaaggagataacacaattcagagctcacatgtggtctctggcttaaaggacaatgggcatctccgctggcaatttattagaggggtgtccagcatagtaatatagtagtatactgaacaatttatagtcggtaaaagctgctgagattactggcacagagaaaggaagtgacttcatttgtcttccattcgacccttcgagatgtgaaattatttcctttcacactgccaggacaaacacactccacttagtgtgaaccagaagcacataatttataagatgacagagtatggcccccgtataaatgattaatatgtatgtattccgaattctggcatggcgagggctcagatcatcttttattttacattccaagatgggaggcatgcgtgagttttttaattaaagaaagggcctttttgttttcaatcggaccacagcatatgagagagtcagcggtggcgacatccagacttgtggctttaagtgctgttgtattagtttcaaatctctgggataagcagctaagaaggcccagcgctcaaggactcagtgcagggtcacttgcctctgtgtttctgtaagaaggcataatatcaatgtgtcttttgaagacagtgtgagtgagtgtgtgtgtgtgtgtgtgtgtgtgtgtgtgtgtgtgtgtgtgttggggggggggtcaggggagacagagatgaaacctaggatcacgtgtaaccattagaaacaaacatactagcaatgaacttcctttgccaagccccatctggagaccgagcctgagcccgggagggctgcttcagagtcacactgtagttatccactatctagacacggttggctccatccatgcccgaccctgcctctgaagctcagattcccacatccagctgttgcctcgagatctccacttactttaacgagtgtgggaagctccgctgaacttttgaacttcctgcgtccctcgctctttcccagctccacggatggcaattcctttccggtgggatgctcagtcatccttgattcttgaatctctcccactccacatacaaacccgtcaaccaattctctgtgcctcctaaaatagatccagagtgcacccacttctctgcagcttcgatgtcaccattccacaccacccctgctgcttctcgccggaatattggaggaaactccccccccttacttttgtactcccgttctgtcactttttgtattacgttttatttacttaaaaatttttaattagcacgtacacagtaattaggtttcattatggcattttcaaacacaactggtcactgctgattcttcctgcaacccctccctgtggtctgtgaagggttcttcttgtgatgtatttgaaaacttccatattaacagccaaacacacagtaaataatatgattaaaaaaaaaactgcacaccccttctccacccagcctcagtagttattgatacggggcagtttttgtttggttaacatatgggtcttccaaccccaatggctgcccagtctctgggtcacatttaaccacagatccttttctggaatgcaaatgctcttcctcaacctttgcttttcgtcccacaactgtagccttcgggctgtttcctctttcttcttcttctttttttttttttaaagatttaattatttaatatttatgtatttatttattatatgtaagtacactgtagctgtcttcagacactccagaagagggagtcagatctcgttacggatggttgtgagccaccatgtggttgctgggatttgaactcctgaccttcggaagagcagtcgggtgctcttacccactgagccatctcaccagccccctgggctgtttctcaacagccttaggatcaatagcctgaggtcatggctgttcttcctggggctcttctctctcttccaccaggtcgtcttcacccatagtttcctaaagcctgcctctgctcactgcacatgtacgctctatccttgagtttcctaaaacttggctgctaagaataggagtctatccgtctcctcctgacccctgacctgcccacttttctatatggaaatgaattcacagggtgccagatgctttgccaactagaattagcagaccagttgtggaagagcttgctttctaagccccgtccccctttcctctcctttcacatgggcaagtttttcatactggctaccctcagctcggtaacacaaacactacctctctccattccccccaagtaattggttgtcgctagtttgatctaaccagtagttttaaactggagagcaaggtttaaacacgtaaggctgatatgcatatatatgaggatccgctcagcttgaagcaaccagatcttggggtacagaatttgaatacaaaacatttgaatacaagcaacaccagacctaaacctacataactaggttacccagtaggagaaggctggccagctgttttcccgagatgagcaatgtggtttcattgtatgctggtaaactgcaagctagcatgcacgtgttcagagagtgaatcttcgatcctgctgtaagccagaaatcaccatttgcagaccagggtggggattttgagttttatttttggcatttgtagcagtttaaatgggaaacattgcccataggcttggtaagaactggtccccagttggtagcacggtttggggaggtatttcagccttgctggaagaagtatttcactggaggccagtttaagacttttttttttggcttttcgagacagggtttctctgtgtagccctggttgtcctggaactcactctgtagaccaggctagcctagaactcagaaatccacctgcctctgcctcccaagtgatgggattaaaggtatgtgccaccagtgcccggccaaggtctctattatttaatgttatctcagcaaattaagaggtcgtgcacgtacttagagattttgaagtgtgtgctttgaagttaaacgctgtggttttttgatcatgcacatgtatcatgatgaagcaaaataagacgtgtgcttttcagggagagtgtgacacacagtcacacacttcccctccaccatgcttggaggcttctgatgcccacagcaatcccagagggtcaggtgcacaccaactcggctgcaggaggccagccacagctgagagtacatggtgccttcagcaagtctcagaatttgagtgtaaaccctgagtttattcacatggacacattcatctatggactcattgttgtctctttccaatactcgggaaaagtcgagtgtcctgggctatgaggagccagaactgcagaaggagccatgttgtcttttcccagcatcctctggggtctcagcacggtctgggagttaatgtcttgcctcagaagattcatgctatgcctgggctatagactacagaatgtatgtatatgtaactccttaagttagtataagtacagaatgtttacctagttaatgtggcagttgcttaataccatttcctatgggttagtcactggaccttgatacttctgttttagtattgaatattgaacaagatagttggctctaccactgcctcttgtcttcctttcttaaaaacaaacagaatctccgcacgtcctacacatttattatggattcatgtgtgggtatgcatatggaggtcagaggataacgggtcactttcccccttccaccatttaaggcctgtggattggagactggggttggcaggttgatggcaccttttcctgctgagccaccccactgaccccagcgcttgttttttgtttgtttgtttgtttgttttttagacaaggtctcactgtgtagctagagtggccttaaacttgctacatcaccgagactaatctcaaccttgtgatccttctgcctgagcgtgggggttatcagcatctcactagactttatagttgttagcattctgtctaaattcccgttagttggcaacagccagataggcctgtcccgctataaaaggggctgcttgccccctcctctctctcttgcctcttgttatcttgttccctcttgctccccctctctccccattcccttccctctcactccacgtggtcatggctggcctctatttctctactctctccctcctctgtctttctctgcctctactaccctcttaactcccattcccttgccttgaataaactctactctatactatacggtcttgtggctggtccctcaggggtaagggggtgccttagcggcccatgccaaggcatcccttcccccacagctcaccacactcccatagaacatattcttatacctcttcatctttttttttttataaacacagcaatagtgtgaactatctagctctgactaattttaacagctggagaagccaagacacatgtttatcaaataacatttccacagacccacaatcggttgtcagtggagatggcatttgaatgtcagcagattccattcatggccagggctcggtggctacccacactgtcctggcattgacctcatagaggactctggcagtctgcacctcacttgattaatagttcgggtgaaggttacagggcatggtgatcgaattcacgggtaacctaacacgtaagaaggctctgcactcactggggtaagattatttcacagggggagtttgctgagaaaacacaccagaacaaatgtgcacctgagtgctccttcaccctggcactcttgacacttggagataaacaattttccctttgtgaggagctgtctagagcatggtaagatatttggcagagcccttaaccacttatcactcgattctactgacaaccccccagttatggcaaccagaaaccttccaaacaatgtcaagcgtcacccgaaagcacttcctgttgagaatagctgactttatttgtatattacactgccttatttcataattgcggcaagaggggagatagagttgaaagggaaatcaaagtaacctgacttgcaggtggcacgctcttgtcataaagaattaactcgcaatgggtgtgagttcctataacccgatggacttggaaggatgaatacctgcaaagaagatcaggtggttaggtcagtgaagggcctaaaaggatgagtgtgtaatcctagcaccaggaaatagtcagtgaaagaaagaactgtttcaagaccgaggcattgatgaaaaatgcccttgtctagagaaaactcagaggtgagagggaacaaactggaaggagccacacacattcaccccaagagggaaagaatccgagctgaggcttgcttttgagaacttggagacttgggcagtaagccagtatatcttttatctttttatcccccgagagggggaattaagaaccaaagacatttaaaaattgtgattatcaatgggccgaggtgtgattcttaagtgatgagccaattgtattacaatttcttttgagggggctggagagatggcttagtggttatggggcaccatctgcccttccagaggtcctgagttcagttcccagcaaccacatggtggttcgcaaccatctgtaatgggatttgatactctcttctggtgtgtctgaagacagcggcagtgtacatgcaggtagaacactcatatacataaaataaaaaaatcttaaagaacatttcttttgaaattgatgtccttaaggagaacgaaagaagggaggaaatgaaggaaagagagagaaatcaggaaagaaaagaagaaagtgttcacaatgagcaacctgaaaagttaaactgaccaaacaataaaggcaagtctccaaatgacataagcgtctctggaaactcttgagtttgaactacagatgctcaatatcaagccatgtttgcttctatcgcagccatagtgacacacatgcaaaaaatgatacccacagccaaacagtggacagatctggggcactcttatggaaaagttggagaaaggattgaaggtcctgaaaaggttaggaactccataggaagaccaacagagtcagctaacctgaacccccgagggctctcagagactaaaccaccaaccaaagagtgagcacaggccagacctaggctcaccacatatatgtagcagatgtacagctcagtcttcatgtgggtcccccaacaactggagaggggactgtccctaaagctgtagactgacgatggaacagggctgtcttgtctggcttcagtgacagagagaatgcacacaatcctgcagcgacttgatgcaccagagaggggggattcctaatggggccctaccctctcagaggagaaggggagagtggattggaggagggcctctgggaagggggttatgggggggggcatttggaatgtaagcaaacaaacaagcaaatgaaagttctgttctagggttaggatgcaacctgcctcctgtctgccattgttttgcctttgtgtagcttgacaaccagatcagaaaaaagactttccccagacaattgtttttggggcagagaaacccttcaacagtactcacaggctctcttctttcaaacaaacatgcattttcacaacaacagttttaacctttcactgttgggcccttgttctcaggacaccttcccaattgtcccaataagagcatgatggtttttttttttttactggcattaatctttttagcagttgcaggtactgcctctgcaccctctttaagtctacagcagcagagattctcacactctccttaccaaacagcacattgctctaccccttctgttcttatgccttagatctgagcaagcacaatgaacagtaaccgggccacatcctgaatgctgcactggaaatttacccccgccaaggaaatgatctcattacttccgaatatgaccttgcttcaagttttggaacactgagaagaatgcagcaaaatcctttgccagaatgcgacaaaaatggcctctgactgagtccatcatggtttcgttgccctctgatatgaattcatcatggtcctgttgccctctgatacatcgtaaacacagcactcacagttggcagtactttaagtattctgatctcccgtgttcccaatagaaagacccattaagctctgcttacagatctctgggatttctccagcctgaagctctaaatttcccagggaatatcccagtgaacggcctaaatggatgtttatgtttatcagagcaatatccccactcctggtaccaattcttaaaaatataatattcttattatttttgtaatttcatacaattatacaacataaaatatactaatcctcccttctccccctcctctcctcagatccacacccacccatcccaatgccctcactttgttaaactgtctactgattctaatttttgctacctatacacttatgggtgtgaggccattcactgaagtatggtcagttaacccagtaccaattttatgtattaggtactttttctgttgctgtgaccaaatacctgacaagaatcaaattaaatgacacaatgacacaatatgcatcttaggacaacctaagaagcattccttcttgactgtaaggccttgagcaaatccactggctttatggattatctttttccctcagtttctgaaaactgcaagtctactttccaatttgtatggatgcccaaacctggacaattcacataagttaagactttttcctaatagtcatatttgattttatgtgtatgagtgtgttgcttgcatgtatgtatgtgtatgtatgtatgtatgtatgtatgtatgtacgtaatgtgcagtgcccaaagcaaaggacatcagactccctgggactagagatacagatggttgtgagcctcccggtgaggatgatgggacttgaacccagatcatctgcaagagcagtaagtgctcttagctactgctgagccacatcttcagctgcacaactgaagccacgaaaggagtgtctttcacgtttggcgtctttcactgagcatagcattgcaaggcgcaagtgttctgtggtatgagtcattctttcctatagtggttaaataatatctactcatttatccactcagtggcttactggcctttgggttattttaacttcagggtgattctgaagtgattttgaataacaaggttaggaacagctgggttcaaagcaccttgtgaggcaggtagacaactcagagaatttattgcatacaggagaaagaggaggtggattaacaaaccctggtagggggggtccccgtagaggagcagtctcagacagcagtcatcatgaggaggcagtcatgattgaaggtttctgcatagtccacatgggtacatggaccaggggaaggcattgaaattgccatccatctgggcatagtggtcctggaaacggccatgcccagtacatgttcagtctggactccacgtgctccccagacttcagggtactaaccttatcttttccccccacccgtttgttatttttacacagatttaaaactccctgaaacaggttgtttctatgattgttgagatttaaatggaccttatctatcatctttcatctatatctctatagccagtgttcatcttttctgtttggtgttctgtaatgttgtttttatttgtttgccattgctctttacattttggctaaaaagcctttaggaaccattccgttctatcgtggttgtcatcgtacctcctgaatatgaacactgttagctatttttcagggttctgaaaagttttcagccattgccactttcaatgttgcttctctgtaccctcagtttgatctccagttgccgactagatttacagtggtcctgtctcttaaatatatcaatatatctcatctgctcatttttgttttttaaatctctggatctctctgtacagcattttaagatgctcacttctctttgctctttgcgaatcctctcctcagctatgtttcttctgatgacttattcagctcccgagagctttacattttagtttaaatttaaaaacctctcttgataaatgtgactgagagcacaccttggatatatctcctgcttagtcaaaacttatcaggatattcaattaccaaacctcctccaattcttgagtagacagaacccatctctgacccctgatgcttgtggttatcttgcccaagtgtatatggccttggctacagaaatctgaataaacctaactttttcctttttaaagatatatttatttgtgtattttatgtatctgagtgctctgtcttcatgcacaccagaaaagggtatcagatcccattatagatggttgtgagccaccgcgtggttgctgggaattgaactcaggacctctggaagagcagtcaagtactccagccctcaagaaaacacccatagttggtaggatctaacttttgtttaaacaacaacaacaaaaaactacaggtgcatttctggtttttgtgcaatggtttaaaattaattgattgattgattggttgatcaattgggttgcagaatcttgctgtgcagtccaggacctcataactaagctacaagatgttttttgtttgtttcctattctgcctcatctgcaattgtttttatgtttagcagtctttctgtctatgatttccattccattttcatagctgcgattattttaagccatttatacagcttaattctttccaatattctttttgacagaaggtcatactatctggttcttctttgcctgtggatgtttgttcagagtggattgtgtgtctgcatattgtgtggttttccattgtaatcgagccttcatggtgaacctgggcccttccagagtatatcccgtgtctgtcttttcaaggtacctcaaggagatcagcaagccagtgccaactatttttttaaatgaattgattttttttattgtcatattttacacagaatgtgatttactcttttattttttaatttttaaaaaagatttatttgtttataaataaataaataagtaagtacactgtagctgtcttcagacaccccagaagagggcatcagatctcattacagatggttgtgagccaccatgtggtggctgggatttgaactcagaaccttcggaagagcagtcagtgctcttaacagctgagccatctctccaacccttttacccttttaaatatgatgaaatgtgatacctgtgagcatccactgtctgaaggcccaaagccactttgtaggacaccaagttgtcatggagactgcagtctggtccttcacagatattagtccacagaaaaatatctccaaagatattaaaacaacaacaaacttgtaagtaacattttaagagatttttctttatcctgatgcgaccccaaataaattagacagaaactataagatttgtctaatcaagctttatgacacaatagatgagcagttattagtcttttctaatccttgaaggtaatctggctacctcccagccaaaatcctagtattgatctctctgctccaggtgtgtccccaaggtgtctcctggaccttctcctcataacaactcctctctcccccctcccttgcctgggattggaagtctagccctattctattctctgctcggccactggctgatcagcttttattgacaaatcagagaataaattgggagcaacgtttatataacatagaagcaggagatacttagaataagcactaggatgccatgtctggattggattgcaaccaggtagaggggaagagaaatcagcatttgaataacacaagggtaatttagtgtgcaatgacatcatgtccatccctctccagtgtttgtattcatgtatttgactgaaatagaacattcacacaaaaacatatgtcatcccaagcacacatctaaacaccagtcagtgagtggacagatgtgggggtccagataaaccagaacaggcccgccatgacattccagctgctgcttcctctcctacacagtcattagtctgactcctgacaggcagcacagaggaactaaacagctctccttttattctggatttaaagagaactttctggataccagttctagccagtccctcagcaggacaagtttccgggagtagagactgccagatctccccacagtcctgggtttcatttatttatgtatgtaagtgcaattacacagcacatcctgagtctggattattttgtttgctagttatctattttgttctcttggagataccatctcactgtatagccccggctgtcctgaaactcaccatgtaaatcaggctgaccttgaactcagagagaacagcctgcctctgtctcccaaggacccagcttccttccattcttttgagctctgctatgtggcaattaggatatacagagtggttctgggtgggctacccaaggacaatttccatatgtataggctgacatatctccaggtatacttcacacctaaatagtttttacaggtctgccttgtcgactgcctcttgtgtacatccacaaaaatgctttcaatccttgtaaaccgatgccttatgaaataaatggtgtttatgatgaatgcatttgtttgcatgtatgtatggtgtgtgttatggtttgtatatgctcggcccagagcatggcactattaggtgtggccttgttggagtaggtgtgtcactgtgggtatgggctttaagactctcaacctagttgcttggaagccagtcttccattagctgccttcagatgaagatgtagaactctcagctcctcctgcaccatgcctgcctggatgctgtcatgcttccaccttgatgatgatggactgaacctctgaacctgtaacccagccccaatgaaatgttgtccttatcattgccttggtcatggtgtctcttcatagcagtaagaccctaattaagacagtgtgtttcagtgaaacatgcaaacacaaaagaggggtgaggagagagatgtctgactcattttctagtcatgatctcctacccaggtcggatgctgcatgttcaaggttatcttactctcataaacaaagccagtgaaaaggtggactgaagaagctgagtgactgtggagacagggataggaaagagtccatactcgtgcttatgggcaggctcccagggcacttgaagcttggtatacaatgtggaggaaacagttgtcgtggctctgcagtaatgccgttgatgggttgcaggtttaaaagcatcccaatgcagttatcttgttttactcccattctagactttattaatatgccttccaataggcaatcatgcagcacacatggatattatagagaaaaagctgtttatcagtgtttctctgcctctggtgaatactgtaagaggagacgaccacggagagaagatctcactaacctcacatacacgtcaggcagatgcactccataaataccatcatccaggcccagtgtgcaagttgaacaatagaagaacaacaggggtaagctcatctagctactgacacagatgggagatttctttacacagcagaggtcctgccagtattatttcttaagtacaccgacgttgttcttttccaagagtcatttcctagggtcttcttgcccacttggcagaattaagcttttcctgatatgagcataggggactcaatggcagagtgggcttcgtggtggctgtggccctgtgctgaccccttaagctgaccctcagaggatgctctttgcaatgggaatgggcctaatggctagtaagccagggttatctcctgcggttataggagtggagactaagtggaggtcaatcttggggaacaaatgtttacatcctagcatgctcaattttccttatctaacaagcctggttagcaccctacttagagctggggtattttggagtcagtactccagaagctaaattccacgtgtgtgacttaatatctcctaagtaaatctagcaggaagtcctttacagcaacacttctatcattttgggtttcttctatctctagtagaacagctgtttttgtggtgggtgtggggttgggggaaggcagtcttggcaatgtttggagacagtttttggttggcatggagcaggcaggacagaggcaggtgcactacagctcactctgacagaaacaaaacaaaaacaaaaacaccccaaacctctctagcctcaagggttgaagtagacaatgtccagatcccccttccagacccaggggccagacacaggctaaatggtgtgaactatctttcttgaatgcactgcttcatgggatactttccacctctggccagcctacatctggttcacctcaagcctgtttaagactccagtggtgtatggtgatcaccgtgtgtgtatatacatacatatgtgtatttgtgtatgttgtgtgtgtgtatacatacatatatacatacatacacacacacatatatatagaaagagagacatacatacacaatcattacaattaagcaacaaaaatatactaggatttacaccactatttttatgtttgcactgagaacattaggtttaaagggtacccagcacataaaaatacaacatgtttgtatttgagaaacaaagatttagatgtcccctcgagcctcaactgcaaggcaccctttcctttatccataaacctggtgacttaagctcagggtgatggtgatttcattatttctgcaacgggaggcgctcatcttcccttgccccttcttcctgcaggggactcagccttccacctaccttctgattcatttcccctggaacgctgaggagttttttacaatgatccgatctgttttgtatctggtgtttccattgtaatgctattacagaaccagcgtcgtgacaaatcgtctgtttatgaggggaatcagttctacaagaagtagaaaattaggtaagcttctgttctgcagtaacaataaaaaccaggatgggggagaagaatcctccaatttattctcatctgtatcagcagggaagcttgagaagatgagaattttctcctaatatcttctcaagccgatgattaactacagataccatgccaaaactgtagttcccctaaggaagaccaagatgttctcaagcttagcctgacacgggccctttaagaaaaccaggcacttcaaactccacccctctgccgactggaagcctgcaggtcggcttcccaaggcagtaagttttagggataaaccggagagagctagtccccacccctcactcccgagagaatgctccaagggctgtaagccctccaaaccccgcaatctggaggtggggtgagaaaagaacaatagaaacttgtgaagtatggaagccacgcccaccccagactgccctgaataaagcggaaagaatgcagttaaaccccagtcccgggcagtgctccccttaccccatccatctcaccccgcgagctgcttttccagaagcgtcctgtaaccgaaggagccgagtgtctcctgtcccagacccaacatggcaaaagtcaaggagccaagtaaacttcagtgacaaagtggctccctcagcagaggattatttacactggtgctctgctgctggagagcaaagccaaaggctctcctgcactcccctggatttttaacttttattgttacattttgcttcaccgactgtgttcctagctctaaactcaagcctacctaggagacgtcttggggggtgggagggctcaccgaagttagcatgtctgggttgttgactagaggcagccatcttggtaaacctgaggtcaaggtttcacccctggcaggttaagagttattccgaggtgagaccagttcctatttagcagtggggacgaaacatgtctaaccactggatccaatttggtttaaagacaaggttatgagccaggaaagccatgtagtcatggctaagcgctttataaaactataaaacagttgacagccagaaaacacttttcatcccgcacccctttattttgcattttgtttccatgagtttgttcttccgtcgactaaacttggataataaagcccgcctggttagtttcactttccattttttcccccagaaacgaaagctgttttgtatcaggaggtgaagtgtttagacccttctcacctgctaggcctgtttcctacaagcaagctctcctaagagggaggggcctaacagtatttgaatttctgattctttgaagctgggctctctacagtagtaattacggttttattttttagctcctggagttttgtaggagttggagagcagcggataataatggttatacagttcccctcacttaatcgtggttatttgtttagcattgtgcctgcagttactttggaaaattggtacttgaagtttgtttcaacccttctgagattaaaaaaaaaaaaaaattaaataaagctcccgtttctttaactagacaaatcttggtttcttaatcctatccccgtgaccggtgcagagtctttgcaggaggtaaagagaaaaaggtgggtggcgcctggttcaaacaactggacgcaccggggccttgtggcaagctaggctaacctgtggctgccgacatgccacaacacagacagacacacagagagggagagaaatagatacacagacacacagacagacacacagatactcttctttttcgacccactgcagtgcaactttctgttcccagccccaagcgcggtctgcacggggcaccctgggggagatccacgcgcgccggcgccgatccaaggtgccaggctccagctgagcgggggtgggagggtggggtggcccaaggagcccggctgcccctcccacgtgtcccggcacctgcggggctggcgctgcgtggggtccgcctttctccggaagaggcggcgcggcgcggcggtgtatgtgtgtgtgttggggggctggggcccggggacgcaggggaccctccggggcgggagcacgtgcgcggggaggcggcgggggctcgagcgtctgtgtgcagctgctaggagagcgctggggctggggctttgcggggacggccccgcggagcgcgccagagtcccggcgctgcagtactgcccgnnnnnnnnnnnnnnnnnnnnnnnnnnnnnnnnnnnnnnnnnnnnnnnnnnnnnnnnngcgcgtctgcgccctgccgcccgcccgcgccgcgctctgagctcccccgctccccagctcccccgccgccgccgcgcgcccggccccgcgcccactcgccgcgcgcccactcgccgcgcgcccggccctcggcgcccggctccccgcgcccactcgcccagccatggcggacagcgcgagcgagagcgacacggacgcggcgggcggcggcccggcagccatgcagtcgtcctgctcggcgacctcgggcggcagcggcgggggcggcggcgggaagtcggggggcattgtcatctcgccgttccgcctggaggagctcaccaaccgcctggcctcgctgcagcaggagaacaaggtgctcaagatagagctggagacctacaaactcaagtgcaaggcgctgcaggaggagaaccgcgacctgcgcaaagccagcgtgaccatcgtgagtgcaccccgcggaccaggggggacccccgagtgcgcgcccccgtgcggggttgcgggcctgcgggcacagagagcgggccttggggccacgagcgccctccctcccttgaggtgttggaggtgcctagggagactccccaacgtcccctcgtcgcctagggtggaggtccctccgagccagggctagaggctggcggcgtggctggggggggggcggggtgggactttctcaaccctagggtgcctgaaggctccgaatagagggacaccctctccggagcccccgtgagtggacgaagctggggtctgtccaggggttagttggggagacggggtgtgccactgggctgggtccccagttggcaggaggacggcgctttgctggatcgccggcgctgggggagggagagagtggcccggaatccgggaagtggagttttctggccaggatggaaagggaagggcgggcactgaggctacaccagcaccccgttcggaatcactgtccttttgggcccggagggtgggcgggtacagagtagtggggagtgtaacgtctggcgctggctgggacagggttggagcttgaaaccaggatggagggtggccgctgggactgcctggctgagcaaggatgtacgtgcgtctccttcattggttcgagagtcttaggagtacttgcctgtgagtctaggtacttgacgggaacacaggccatctgttctgtttctacctggcccctcgaggctcccctggaagagggtaagattagtctgagatcagcctcctggtgtagccgagtggaaaggcccccgtagcggtgatgaggcgaaacgtaactagaaaaagtacgcgttgtgctctcacctcccatccttgccaactctacatcattaacatgcagaatcccccacagacaaccctattcagatcaaaacagtttcccagccagcagcacggaaagaaaatgtcaaggaatcaaggaggataaattgccagagccgcttgcacacagctgattagatgaaacccttccagtggagaaaaagagatttggtggtgggtcagggatcatatcctggagacgagaacgggacaaatttaagctgcccttgtgccaagaaaaagtgatatgtgtgtgtgtgtgtgccctgtggcttctatatggctgccttggtttgtgtagctagccggtctcagtctccactagagaggcagtgtgatttgcaacctaaatagcagttggtcttgcagaaaagcatcttacttgctcttaaccagtcccgttctatgcgagtacatctccaggcagcaagttactggattggccttttgatagtaaaggaaagccgtttgtggaggtaaccatgtaagccttttctgggctaagaaaggactctgcagagttgctgttgaagaacagagggacaggacagttggaggttgttgtttatttaaaatctgatgcacaggaacgctatttaaaatgtgccgtaaaggacagcgttggtcgcttgcagagctggaaccacggaagggagcagaacttacaggaggagggggtaccacctctctggcctcttgtttgcccgagcagcaggtcaggctgctgtttgtgtggagacaggaaacacaatgaaaggttatctgtttgacctgctgacccataagcaggtctgttacttgtacacagacacactggccttgcagggacaaactggccttgcagggacaagcatgttcgtcagtggcaagcaaagccagacacctcctgagtacttaacagtggatgaggtgggggaagctttggttctttggctctcactctcagtgaccgaccactaacttacagtcagagccatggtgctaggaagttgttctgtagtcctagccagtaaagttgttaagtcattcaagctgaccacttgcaagtgtggggcaggcctcaaagttcgttttctttctttctctctccctctctccctctctccctctctccgtctccctctccctctccctctccctctctctctctctctctctctctctctctctctctctctctcccctaatgtattcaaggagataaaagagcacatggcccacctgagtacctcactcttggcaggggtttaaggggctaattgtcaggggcaggaaagagattgaggaggctgttcacctgagatgtagctgttcacctgagatgtagatttgggggcagggtcccccctctgaattggcttaagccaggagagtccactccagcgtccagccgtgcgctgcctgacacacctgactgggaagactctgacaagggttaggtagctcatgcaggcctctgcaggtttccagagttttagttaatttgacacgaaggggagtaacggcaagccatttcttgctttctatgctcttgcgcttctaattgtgacaatcattttcctgacgatgtacagtaaaggtgatgaaggctgtacttagatacgacaaggacggcctgttgactttcagttgtaccttgatggggtggggtagtggagacccccttgaagagtaggctattttccccagtcggttgaggtttacggtaaagaccggcatagtttctgccacctgcttcctataccctctgtaggcacaactccctccaccaccagcctccggagcaacagagtggggcagttgttaagaattgagggtcccacgtgtacccatagtctgtggtttacgttagggctcactgttggagttggatattcttttttgttgttgttttgtttttgtttttgtttttcaagacagggtttctctgtgtagccctgcctgtcctggaactcactctgtagaccaagctggccttgaactcagaaatccgcctgcctctgcctcccaagtgctgggattaaaggcgtgtgccaccactgcccccccccttttttaataaagatttatttgttttacatatgtgagtacatggttactctcttgagacacaccagaagagggcattggatcccattacagagggttgtgagccaccatgtggttgctgggaattgaactcaggacctctggaagagcagccagtgctcttaactactgagccatctctcccataagacctggacattgctgagccctccctcactgtagtggggatgtcctgtgggtgtggaaaggtttgccctgtcacacactcgatagaatgaatggaaggattccccatcctctttcttttgcgtgtgtatgcatgtgtgcccgcccatgcacacgctcacaccaggcatgcatacgtatctatggaagcctgggattgtgttctttgatttgtctcttctttattgagatagggtctctctcacgtgaccccacagcctgcagattaggttagtctagccagctggccaggccagtttgctcaggggtttctctgtttccaccttccgagggctgagattacaagtggatgctaggcccaccgaggttttgatggattttccttgggttctgagaacccggtcttcaagcttacacaacaggtaccttatccaatgaccctctacagtatttatttttttgtggcttgtttctttttagggcttggttgtgaccatttatctactgaagggcatcttagttgtttgcaagttccagcggttgtgaataaatctgccttaagcattcacatccatttgtctagacaaaagatttcagctcatttgggtaaatacccaggattagagttgctgggttatgtggtaattgagtgtttactcttgtaagaaattgccagtgataaatgacatttgggggtgctctccctcacagaatgtggtcctgctcttcctggattctgatctttctcacaggcctgtactggtcccaaagtgatgtacaaggctccagtgagctccagtgagctctccggtctgctctggtagagccggttcattcctactgcgaatcccaatttaaaaagtgtggatcctttggtctgtttcctcagaatctctagagtaagaggaagccattgcctgtggggagagagtgtgtgactttgtaacaggcctcttctcttggcctgtccatcatatgggggaggagttagagctagtcttcagtaggatcagagatgttttgagtgactatccaattttacccattcaatcagcagtagaggcaggctactgattataaatggcatttttttttaagagtgggaaataaacaaaccaaatgtttaatcaccccttcaaatagtgtttatgtgttagtccaggttagtgtggggcaaatcctggaagagtgtggtctctggttgtctgactcagagcctgagggtggtccaggggtggatggtttctgggcaggtgtgggggcacagttgaagggtggtcccaggagttctcagccagctgctggggtgataggtgtgagcagtgttcagctgcgtcctgtgcactcctgacttttctagataggctctgacattcggaaactttagtttggaaataaaggcctggaataattcattaagatttaagtgtatctcctgattgtaaaacagatcccttctctatagaagtttaggtcagtgtagacataaaaggtttttttttttaaagatttattcatatgtgtttacctgtatgcatgtatgtgcaccacatgtgtgcagtgccctcagaggccagaagagggcactggagcccattgagagatggataggagttgccatgtgggtgctgggcactgaagagagtcctctggaagagcagccagtgctcttaacctcagagccatctcttccagttcaaaacaaaagtgttgtgaagtggtagccaaaaccaacagccagacgttggcatgttcagaaccgctgacgctcatcaaccgtggtgtccttacccaaggaagcacaccctgcacatagctcattgcgtgtgtttgggataatgtactgtgcagcctcagacacagttttccatttttgagactttaaaatgtcccctggagaaaggtggagtgtctttctcctctgtagaaaaataaattttgtttaggttctcacagaagcgtgcactgacgacacgtccgtctcttagggaaatgggagcccagcattagatctgtctgcacacagctcttaaagagaatgccttgagtactctgcatggaaagttccatgttttacctctgtgaggcaccatctacaagacatcccaacgttggaggaggtcacgtagtcttctgtaatcctcttgttattcatttgatagggatgggggctagttagagaattccagagagtcaggttcatggggactgctgttcaagacctcagaaaccggttttgagcaaacaccagagcttcttctttttttttttttttttttggtttctctgtgtagccttggctgtcctggaactcactgtagaccaggctggcctcaaactcagaaatctgcctgcctctacctcccaagtgctgggattaaaggcgtgcgccaccacgtccggcaacactggagcttcttaaactttttcatttgttctctttcgagccaggtctgctttcctttgacttcccaggctgtgtcactgaccgaacttgcttgtcaccatgttctcctcctgatctgccggccgtgtgcatctttgagcccacatgggcctggactgagttccgcggccctcctctggctgctctgctctcttctaccctcccttctccaacaagaagtctagtagtctgtgctgtctccccagccagtgtgccttggcagtgaagctttgtgagctatacctgggcagcctcagaacccatctgctaccacccctgtctggaagagatgtgggtcttcccacagggtcaggtttttccttctttgcccatgttcctcggaggctggcttacaggaggcacacacacaagggttggtgagttggttcgtgggggtggggggggggttctctgttcatgttagttttctggggttacggtattattgcctgcactttaagcttataggccacttctgtcgtcacagctaaccccctcttcctggtttacctgataggataggtagatggtggatacactgtatatattatggggactcaaaggccacatgtgccctaagctctggcctctgcctgccaggctaccttgtagcatggacctggatgctggtgcttcttttcatttgcaaagggacaaagtgtcttcaggtcgagactgaggaaggcctgggacagcagcaggtctgtcctaagtattcaggttcacgttttgtcgttttgtcggtgtcattggtgaccgatcatttcagatggttcctatggcttcttttagattgaaatcacctactctgcctctgggaagcatccgcggtcttcataggtgatgaggtcgtggggactcgggctttagatagaggatggatgctgagaccaggattgggaagagctgtccatcaccagtgatactccaagcggagtcagacgtctatgctgtctgtagttgcattttttcttagtgcttggctccccttgaaatcctgccttgccggatgtagccaggtttacacccagagatgctaatgcttgtgtttaagatgcagcaggactgagtggggaggagtaagccatctttcttgtccttccggcgtaatttttttttcccctcagtgggggaggcattggcgttttctcctcagtcacagcgccagttgcttttaggtatattgaattattgtcaaagccagcagagtaaatgctcacaggttcagtgtgttcctgacaggaaaggaggctctagaaaacactgacaaaggccaggatctcagaatggaagcttgttggctcttcttgtcttctagagattatcgtgtgctctgtgtgtgtgtgcgcgagtgtgcgtgtgcgcacacatacatatacacctttatattttatggttgtcagatgcagtgtgaagtttatccctacaccagggtcagtgggtagcaaataccactttaattccctcagggataaatactgagaaatcggggcataggttccataatgtgactactgctcccttcgtgcctctagatccagtgtggggagccttttactcctttgtttaattagtgtacattcattgtacaggttggtggatctcataaggacctttccgtccaggtaccttaatcttccatgactctcctgcatggagtgggttctccgtggttgaaagtcaggatgcttccttgtttgatggcgggatattaagccttttacccggttatcttttatttcctcagaaagacacaagatggcagggagtcataaataaagccttaaagagacaggagtcagtcttcaggacctgcaccggacctcttgtgctgagaaatacccagaggcaatttggaggctcctcagatgaccagccaggaccacacctgacttgatccatcttggccctggccgggcattggaggaacctgagtgcagaggaaattggggcccagagggtctgattcctggtgtccccgtgcaagggagaaaggaagtgagcacagactcctcctgggtttctgaaccagggcacgcctccctttggcctttctaaaatgaagcttatctgacttgataagcatctgccaggaaagctcggtgtcggagcccctcagagtctttagcccgcagtttaacttgtgaagtttaacttgtgtcagggagctggggagctgttgctcagttcatctgtgttgagatgtctgtggtgcctttgttttattgtatgtatgtatgtatgtatgtatgtatgtgggtcagtgatgttttaagatttgtgatttgggtctgtcagcatagcaggctaaaccccgtggtccaccaacccacctacctccctaacatggaatcatgttgatggagcgtgactgccaatttttttttttttttaaacccaaaattgtgggaaagcaaaagacaacttaaggtaaagttaattagggagaggatctttgggcaggattgaagcccagctggttaaaagcccaatgctgatggatggggctaatctctcacacatctgtttcacatctgtccagactcccccacccccaccccccctccccaggaggccaggtgtgcctctagcctgagctgcttaatccccaccagggcatcccagggcactgtggacatcatgtggggccatgctcagtggggagtggaggaggtggcctgtcctcaccagcacaggtcaaccttcaaaagggctctcccaagagggaaagaggaaacgggagaagcagtggattatgggtgcacctcagcacagaactctagttgcctgtaggaatattccatgagttgttcacataaagggacgttttgattgctttccggcataggccttgaaagatgaaataagaggggctcaatgatgggcgtttggttggctggttatcctgaaacaccagaaaataacttgtgtcctgcagagagttttgtgtggaagagggctcttctcctgatgggccttcatccatgcagagcccacacactgactctagagggtctaggcgatagatgagtttgagaagagctggctagatgctttcagtgtctttgttagcagagagcacatgacgcacataggtggccacagtcagcactgggtaccactgtgaaggcctgtgtctcttggaaagaataccaactcttacacacctctttgaaccttgaccacaaggagctgatcatgccatggagctgtgtcaggccctcagaggagaggctggtagcttctccttatgtattccaaattctcagtgtgcactctgctgccataaccaggttacagtgtaaggtttggggccccaagtgcactcccagtgagccctgtgtagtgtcaccacaatgacaatgggggaacgctacactaggtagtgtctcaactttccctctcttgtgagctctgtttgtggtgacttttaataattgtttatttattcatgttatttatctgcggtgtgctgagtggaaaaccacggccttcagcattccaggcaagggctctcctcccgagtgtgacaaaatcagctcctttttatttaattctttgaatatttgtacatatgtgtgtggtgtgtgagtgtttatgtgttcttgtgcgggaacttgtgtgtctgtgggcacagaggtggctgttgggaggctcttcctgtgttgttctccactttgagacagggtctcacaacagctctccagttggctagactcatgcaagccctagcaccacaccctgtgtcttacttgggctcggctgtgctaacaagttttatgtcagcttggcacaagctagtgtcctgtgtgaagagggaacttcaattgaggcaatagctctaccagatttggcctgtggcctgaggtagattttcttggttgatgctggagggcctagcccattgtgggtggtgccattcctgggctggtggatgtggttctataagaaagcaggctgagcaagccatggggagcaagccagtgaacagcagccttccatggcctctgcatcagctccagcctccaggttccctgctttgagttcctccctgacttccctggatgatggaccacaagcagtcagaggaaataaccctttcctcccccacactgcttatggtcactatgttttatcagagccattgaaaccttaactaagacagtggggctctaaagttaggtccttatgactgaggcaagctcttcaccaactgtagggtgaataaactgtcacttgaagggggaaggaacacattaaaacttatagaattcttgccaacattttcccacttacgaatcttttcaatgtatgtgagtgtgtgtgtgtgtatatatataccgtgtgtgcagtcctcacagaggtcagaaagggtgttgggttccctggagttgggattacagatggttgtgatctgccacgtgaatgctgggagctgaatgctggtcctctggaagagtagccagtgctcttaaccactgagccacctcgccagcctcttgtggattagagagatgcaaagggtgggattttgcatacagcctcatttacatttcgtgtgtgtgtgtgtgtgtgtgtgttctctcctaccatgtaaggggccagcttgttgaatcctcactgtgattctgcagatcagtccctcttatactctttgctatgaaccacaagtagatgaaccaaggcttcgtatttggcggtgtgtgtgggtgggtgtctcaggcttttcagatgatgccagggtttgaacttgggtctggtttctaacggaacgcacaaggtaacagccggcgagagggtagtatgttaacttaggggcggtttcgtcttcctctggttgtaagcatttgtgattggtttccatacagatatggtcacttactgaggtcgtcagggctgcctcattcatggcaagttccccaggatgcttggcctagggatgtttgtcaaggcaggggactctggggaaagcagtcagagcagagagagtgcctacactgtcggaggcttgtcctgccgtctgtctgtttccactttccagccctgcactcggttattccattcccacaccgtgtctttggttcccgtcccaggccagagtcagtttctactactgtgcttatgttacagccgctgcttaaaaatagtccgagtccgatgagtgtagggcaaggagccttccccccccctcccgcgccccccccccccgcccccaacaaagtttgagtacctgttgtgtgtctggcaactgttcctttacgtatcgccacacttgatctggaccagtgcttcaaccttcctaacgcttcaaccccttaaaaacagttcctcatgttgtggcgatccccagctataaagttattctgtcgccgcttcatagctcattttgctattgttatgaatcctaattaaatatctgatatgtgacccctttggagtcgtgactcacaggttgaaggagggcagttgttatgccaagacatgaaggagaaactgaattgaagtgnnnnnnnnnnnnnnnnnnnnnngagagggataggtgtttcccccccccctctccccacccagccaaaacacacatgccttgggatgaatggatcttgggaggagagaggggagccggtgggtgcttctgtgtggactctgccctgccccttgaggagataggaagagagagaaggcaggtaaaggtaagagcatcccgactttgagatactcacctcggatgctcagggtacacagtgctgtctcctctcacttgtgcctggacacttctcaccatacaggcatacgatctcccagtcatgggtctaaggacattttgatgcttcagagattgcactgtgtgctgggacaggcccttgcatgatgacctgcttgggaagatcctgctcttgtgaaggaccatagctgttcaacacagtgtgtatgggggggtggttaatttgggcagcactggtatgccgtgcaaacctttgaggggagcatggtgtagttactgtgaagtgcacaagattcccacagatgaattggatggtgtggtgaatttagaaaggaaacgttaggcgcccgtcctgatgctggctctctggtagagcagtgagctctctgggatcctgatgctggctttctgggatccaggtcaggatagcagctatcagcatactctctgccatcagatcagacccccagtggtctttctgactcctactagtaaacattccttttatgtccagacttcacatggttgggattacacaaagtatttgtgcatttggcttctttaaatcctagttttgttatgagtattcaacaacatccatgctttctacagactgggtatttcttactgctggaggatatttcactccatgtctacgtgtcaggtttcagttttagtttcttccttttggattctgaaggccctgcactcaccatgtgtcccctgctctgtcctgtcctcagtgtggattttaagacatcatctcagcccagtgcaggtgcttagagtatgtttcaaaaacattcctgctctggctaatcctccaaattgactgcagaaaaaaaaatgatattttaaaaactgagagagaggagcttggatgcctgaaacctcaggccagggagcgcctcacctcagctcagtttctttgggcttctgcttccctgacactaggaaatgagatgcagaagccaggcttgcattagcccttggggctacgctgttccaggagccccgggcaagcctgctttcagagcagctccatccctttccacccccagagccgaagagctctttctgttctttctggaaaataaagtgaacacgtaccttccaactatggactatggaaagacagggctgctctgttcagcttctctgatgtatgtgtggcctttgaccctattccgggcttccagaaggtgaactttggcgggcaacaccctagtgccacttctgtttaggtgctgatttaaagaacagaaatcaaaacataaatctttgccctgcgcaggcatgggactatgtgcaggcatgggtgggactatgtgcaggcatgggtggggctatgtgcaggcatgggtggggctgtgggcggggctctgtgaaagcataggtggggctatgtgcaggcatgggtgaggcttgggtctcaaagaatggctgaagaatgcagacatggaaagacagctcgggagcaggagccagtggcaggtctggtagacagaaatttgctgtgtttccgtggggctctctttttctctctgttgcctcaatctctctccggcagtagtattagagacctggggacttagaaaggttgagggctgtgtttcttagaagcacgcaacacttgagctttgggggtggtgagagtgagggtacaccttctctgtttcatggactcttgcttccaccacctacaaagaacgcagagtaaaccactgagggatgcctgtacctcctgccgtaaaccaggagaggttacaaatgaaataagatacagtggcctacattaaagaagatttttccgcacacctcgaatgttgtgtggagtgcacgctgtttgtttttgtctgtgcttatgtttaactgggcattgggtgttctgcctggcagttctgagccctgccagtgcttcacatccccagtccgctcttcagaccttgggccatctcacctctctgggtttgtggacttcacttacagaaggaagttcgcaggccctgtctgtgttacttgtgtcccctggttttcagtgactccgagtttgcctcttggcctgttttctttctttccctcccttttggatcaggaggcggccccacccagtgagctttccccgctgggttctgagacttctgatgggcacagtgcctcttgtcctcactttgcctttctgccattggcttcctctcttccatgtctggctcactgtctggtatctcttagccacatgtccgtgtgtccttcccccgccctcaactgtggctttctttttctctagagcttgtgatggttcaggaagacttggcttcttggcctctttccgtgagggaatatactctcttaggatctcagcttttttgctcagggtgctggaagaagggcaggcctcagatctacttgtactgcgaccctgacagcttttgacccccttgatagaggatgagattgagacacttgatagaggatgcagatagaaaggaaggcaaccagtgtgttctgattgaaacgaaattgtgggacatggttgctgcagctttggtgacaaagaacttgtggagatgttcctggttattgtgtgaccaggatttgacgagcctggctaggagccttttttttttttttttttgctgtttttgttgttttattcattttatgtaatttatatgagtacactgtagctgtcttctgacacaccaagagggcattggatcccattacagatggttgtgagccaccatgtggttgcggggagttgaactcagaacctctagatgagcagtcagtttttagcccctgagccacctctcacttgttttaagacaagtgtttttctgtgtagccttggctgtcctagaactagctctgtagaccaggctggcctcgaactcacagagatctccctgcctctgcctcctgagtgctgggattaagggtgtgtgctgccaccactgcccatttggagtctttgttcttaagcacttttatgttgccatgactacctggttgccgtggctacctgcctatgagatggcctatgagcgtcctccttggtgctaagcacataaagcgaaaggttctgttgttaatacttttttttttttttttaaatgaatccaggtgcttgccttataggtcggacagcgaatccttatagacaaatatttctttaacctctctgttccttaagcatgcttgtaaaagtgttggtgtctcgaggccttcctgtttagcttttatgggtgatgagatgcttaagagtctatttaactggacagtttttggacacctgggaggtgttcacagtgagctttgagatgcccttcttggaaccaagtcagggaatgagcctcaagcaggtgcctcacttatccactgaccttgtgacatcagtgaaggtgtcgtcgggttgttggcggaacaggtagggacggtgtgattcccagggtgcaacaggtcggtcatctcattcgggatttgccacaggcataagatcctgggactcggccatccacatgactcgggtgtggggcggtgaggcagcccagggatggcagggtcaggatccccaagctttctctgaaggatgcagaaggcagctccttttttgtagcctatgagttcctgtcacccagaagagaatgcatccgcagtgggtagcccggggaaggtagaggaaagagacacagcctggatttccccctcccacctctattattgactcacaccttagagcatagttgtagcttaggtgacttcgggaatgtgttagcacagcctgcagaccgcccctgccttatggaccagagaaggcagtggaaccttttggggctgctggttcagacctaacgaaatgaagggaagatggacttggctgggtttgccctgggccataactgaatgttctgcagatttcgagactatgaaaagacgtaaagactcttctctcaggaggttagaatggggcgggggcaggggggcgttccaaggaggcgacagtgaagacaagccttggaatcctgcacagccccggaccccaggcggcaggatcgggagccagacttgttcctgtcttgtcctttaggaccttgtgatggagtgcttcctcttaggttcatatggtcactcctggctgctgtggatcttctcaggggatgctcgtgggagactcttcacatggatgtctcgccagccagccgcttccgaagcacatgccatttaacttatacggagtggctttcgatgcccaggcaacactggggggaagttcatagacaagcgtagtgatactttcaataagctctgtggtcctccatgtgccagtgacctggaaagatggctgcccagcccagtcccctttagggacttgtctaccagtcctcatgtcagatgcttgaccacattgttaggatatacacagccctcggattcacctactatgaaattagttcctgtgatactaattttaatcgtgtgtaggtgtgtgtgtgtgtgtgtgtgtgtgtgtgtgtgtgtgtgtgtgtgtgtgtgttcgttcattcgtgttcatgttcagatattcaagaaggacagaagtgtcagatcctctggactagagttataggcagttatgacccactgggctgggaactgtacaagaaaagcagtacacattaaaaaaaaaaagattatttaatgtgtatgagtgctctatctgcatgtatacctgcctgcctgaagaggacatcggatttcattacagatgggtgtgagccaccgtgtggttgctgggaattgaactcaggacttatggaagagcagccagcgctcttagcttttgagccatctctccagccccagcactatgcattcttaaccactgggccatctccccagccctgtaatggtaatgaatgaattttgcactagaacttgtaaatatttctttttacttcatgtgtgtgaatgtcttacctgtaggatgtctgcgcaccacgtacctcttgccagcagaggccggaagagggttttggatcccctggaaaagtagagtcaggggtggctgtgagttaccacaagagttaccaggtcctctccaagagcagcaagtcctcttaaccactgagacctttctctaaccttccatatagtaaactccttattgtgaaagatttcaagcatcccccaagatagtgtgaactgcaaactcccagtttcttaaggactaatggatacatggccagccttgtaggaaatgtgtgtttggaggtcaagcagcgcagacatttctgggcccctgtgtattgtctttttttctctgctctgacttgtcacctctgtgtgctgaggcgcttggcccttgctctcctctcctttccccacccggagctgttgacagcaggttcaggggccttttgcccgacgccctggtttctgctagccatcccccaagcatccaagaccttgctagttcagctctcagtcagtctaccagctggcagcccggcacacagtagtaagtcttgcaggcaccttacgggtggagcaggcatcttgccttctggagctctctccacttaagggcgtctgaagttggcatcttgcatggtcccttgggagcttttagctgagcaatgtctgacaggagttggattccaaagttctcaactgcttccaaattgtttttttttgtttttgctttttattcttgttcttttgagacaggtttttttctgtgtagccttggccatcttggaatttgctctgtagaccaggcaaatatgagttctcttgaactcacagagacctacctgcctctgcctcctgagtgttgggattaaaggcatgtgccaccactgcccagctcaaagggctttttaaaaagtgtgtgtgtgtgtgtgtgtgtgtgtgtgtgtgtgtgtgtgtgtgtgtgtgaggcatctgcatgttggcatcatttgtggaagcttgtctgtctgtgatatctgcatgtttacattgtggaagcttgtctgtctgtctgtctctttctctgtgtgacatctacatgtttttattgtggaagcttgtctgtctctctgtctgtctgtgagagtgtgtgtgtatgtgtgcgcgcacgtacgctgcccatgcttgtggttgacatctggagacctaaggttgatgtctggacatttcttcaattcttctccatcttattctttgaggcagggtctctgttgaacccagagctcaccagttggcctagtctggctggccagttttccctgagattctgtgtctctgccttccagtcactggaattactggtgggcagcctcacctgccgggtgtctctgtgggttctgggatctgaattccaatgctgtttccaccgagccatcttcccggcccacctatacaaatgagaaaaattttttgaaaatggaagatagactttcttcatataatatattctgatgaaggttccccttctctagttccttccagattttccttgactcacttgacccagaccacatccttcctttctttctcatcagaatactaataggtatctaaaataataaaaataataccaacaacaataataaacaataatatataacataagataaagacaaacacactggaataggacaaagcaaaccaaagaaaaagtacaagaaacacatagagacatacacctttgcacatacagaaattccataaaaacacaacactagaaaccatactacatatgcagatggcctgtatgggacaaaaagaaggaggaggaaaaaagaaaccttaaagtgttatgtgacaagaaacctccaaagttgccactaagttcattttgcatttggccatctgctgctgggcatgggtgtctgtccataagagtggcttctacacctcgtgagccaccactgtagagaactaagttgtcttctgtgagtggttatcacttggagagagcttttgggttagccatggggggttgtgtgtccacttcccctcttagtgctgagatcctgtccgacttagatctgtgcatagactgtgtgtgctcccatagtgtgtgtgtgtgtgtgtgtgtgtgtgtgtgtgtgtgtgtgtgtgtgtgtgtgtgttcttaacgtgcatctctcggtcctgctgtttccctggtgtcctccatcccctctggctcttaaaatccttctgcctcctcttcttcagggttccctgagctctgaagggagtgatttgatggagacatcccttttagaaccgcatggtccaaggtctctcactttctgcacattgtccagttgtaggtctctgtatttatttaacctactgcaggagggagcttctctgatgatgggtgagcaaggcagtgccctatgagaatgtcagaatgccaacaggaatcattttgttgctacattgctttagtatttggatttccacaggaccctggcctatcgatactgtcttaggttcttgggtgcctgagcagtattggagataagctccctctcatggagggggccttaagtccaatcagacagtggttggttgctccacgagctctgtgccaccattgcaccccccgtgtcttgtaggcaggtcactgttgtaggtggaaggcttcgtagctgggctgctgtttatggttctcctgatggcctgccgtgagcactggtccataggggtgaagtctgtctgtaggcatcggctcagcttctctgttgtaaactgtgtaggtgttgacttcagaagtaaccccttgtcattagtctgaggagggcaactgaacattttggcagtgacctgggttatttgggggtttccatggggttccgttgactagcaacacagacgtaacccattcctggaagtggaagtttcgtttcatgacaagagaggtctagttggggctttctctcccctgttgtttggtgattctgtttagatttctttcgtgtgtgtgtgtgtgtgtgtgtgtgtgtgtgtgtgtgtgtgtgtgtgtgtgtatgcatgcatgtgcgtgtgagagtgtgtgtgtctgagagtgtgtgcatgtgtgtgtatgtgtgtgtgtatgtatatgtatgtgtgtgtgtgtgtgcgcgtgtgtatgtgtgtgtgtggagagagagagagagagtgtgtgtgtgtgtgtgtgtgtgtgtatgcatgtgtgtgtgtgagtgtgtgcatgtgtgtgtgtgtgtgtgtgtgtgtatgtatatgtatgtgtgtgtgtgtgcgcgtgtgtatgtgtgtgtgtggagtgtgtgtgtgtgtgtgtgtgtggagtgtgtgtgtgcctgtgtgtgtgtgcctgtgtgtgtgtgcctgtgtgtgtgtgttttaggaagctgcttctgtattagatactgtgctgtttccctacacccccgcaaacagcccttagttttagctctccctccctgtctgtattccttcccttgctccacccctcctcccgtaccattcactgccacacacacacaaacacacacacacacacacacacacacacacacacacacacacggtccttctgtaacaatctattctagtccctttctaaggacattgactccacttgccccggccccatattttacacgtaactgccctggtaatactgatcttagcctgcctattgaatatctaactactaacattctcatggaagtggatacatactgtatttgtccttttgggtctgggttgcctcagggtaatcttttttcccctagttccatctatttacctgtgatttatttacctgtgatttatttcaggacttcatttcttttaaaagctgagtaatactccattttgtgtgtgtgtgtgtctgtgtgtgtgtgtgtgaatgtttatatgtgtgtatgtattatgttacatatatacttacacatacacacacacatatatacatatatatatatatatatatatatatattatatattttttaatctactcttctgttgatgggcgtctagcctgtttctagtttctagcttttatgagtagtgccccagtgggctagactctctgtagtagggcgaagggtcctttggatccaccctggggagtggtctagctggatctcgatgtgtatgtatctctagctccctagggagctgcccccctaattccataggggatgtaaacctctgccctccaccagcgatggacgagtgctcccctactccccatccttagcagcctgagctgcctgacacttgttctattgatcttggccattctgactggtgtagcgtgaaatctccaagttctgatccgatttacgtctacctgagggactaaggttgtccagcatttccttaagtgcttctcggtgtttgatcttctgagagctctgtctagatccagggccccatttttcaatcgaatgaatgatttgttctcttgatgtccattgtttttgagtttgttgttttggctattagcccttcattgattgtgtagttggtagactctttccccgagccgcaggctaccgcttcgtccaaacgatggtgccctgtgctatgcagaagctttccagctgcagggggtctcgtttgttgttcatggtcgttggtagtgcctgtgctgccagtgttgtgtttgaaaagtgcttcctgtgccagtaagtgcaaggctattccccgtgctccctctgtcaggctctgtgtatcttgtcttatgttgagctctttgatccgttcggagttgagttttgtgcagggtgaaaagtgtagctctgtttggattcttctatgtagtcgtccagtgtgaccagcaccattcgttaaagatgctgtttttgtacacacacacacacccgtgtatatttctgtctttataaaatatcaggtcttctattgatcagtgcatctgggtttttttgtaccaatgcaatgctgtttttatttctattgctctgtaataatatctgaggtcagggctggtgatatctatctgtctgtctatctacctatctaccagttcttctattattcaaggttttatgtatcctagatcctagatcttctgggtctccatatgaagctaaaaatgaaaattatcctttcaagttctgtgaggaattgtgttggggatcgcgttgaatctggagattgctttctggaggaaggccattttatgatattaattctatcgatcatgagcatgggagatctttccatcttctgataactgtcttcaatttgatgtcctaacatttttattatgtaagactttttcacttgcttggttagagttaccccaagagattttaaaatctttttgaggcaattgtgaatggtattgtctgcctggtttctttcctaacttcatttgtcaattgtttttaggagggctactcatttttgcgttaattttagtatccagagactttgctggaagtgtttattcgctgtgggatgttcctggttgaatttttagggtcacttatgtctactctcatatctagctacaaatatactttgacttcctccctgcctaattgttccctttggtctttgtcttacttctctcgctaagattttgagtgctagattgaataggtatggagagagtgaagcagcttgtcttgttcctgattttcgtggagcagtcagctgtttgcactttgagtttctctctgtttaagttgatgttgtctgtgggcttgctataaatctcctttaatatgttgaggatatcctcggtctccaggaatgcgttcattctgtggcattttctctgtagtcgtactttgtatttcttgtaagaccctggcttgggacagacagcccagtgccggtggacgatgtgctgtgatgtttgcattaggcccttttatgtagtgttttgtttttgtttttgattccgcccaggcacttacttaatctctggtttaactggcatcctttctttatcctgggcagtttcaggttgtttatctggtgaagtgaattcgctctggagtattttcaatgtcgcctccttaccgtggcctttaagcattggaccagccacattctcttcttccacagtaaccgccctttgttcacctcacaggcgctgtcttcctgcagctgctctgtgtgtcagggcttgggggacagttttttttttttttttttccttttagggtttacattctctaagaaaggcagataccagacagctgacttttagatggtgataagcctcctgggaggacgtgactggactgagctctcggcttgtccctgaagcgacaccacactctgtcatcatctgtaactagtttgaatagcaaaaaaagctaggcacgcagagagctggtcagaggctgttctggggcaaggggatatatgcatatatcctgagatcgtcagaaggttggcattttagggaagtgagagatgagtgtgtctaggtgcagtcaagatgtggctaaggagatctggatgcgagtggggccaggttcgacctggcatatacttctgcaactaattcagaaagtagtgttggcctgagtgcctttcaagttgggagttggtcttcatttattcatcaatttcttttctcaggctctacacaactttcacttgaacagattaagagcaggtactcccatttttgtttttgagacacggtttcactgtgtagccatggctgtcctggaacttgttctgtagaccaggttggcctcgaattcactgagatccaccgtcctctgcctcccgagtgctggggttaaagttgtgtgccaccacagcctcctggctctttttttagtttttaattaggatgtgtttgtgctggtcgtcttcctgctcacaaattcagatgtggcaggaaggtgcagtggcgtgaagcagagcgtggccaggtgtgaagatagaagccaaggtggaggagggaggactgctgtaggtgcagcccagatggctgtccccctgcttcctgaagttcattctctggcatttctaagcagaagggcaagcagccgttctttctttgtctgtgtgcagtcagaggagcgtaccctcccctaagcgccgtgttagcccccagctgtggttggtatctgagactttcctggctgactcttcacccaactccagggtttgaaggttctgacgatggaagaacccttctctgcagcccagatgattcaggggccgggctttccttatctggtggagcctctctcggtacagtataatttctaggatgactcagagcaacactttgaattttggccagcacattagggttggaaaggaagccctggagagaaagtcagcttgctggaactggggcgaaggtgggtcagaggctgggcccggagagtaggtgaaggcaagcagggagaagcagctcatattagatgggagagaatgacctcgttataggtcagttacctagggagggacacggttaagaattgggtgtccgtggatggtgtgcctctctgcagaggtcaccagcagagagtctgtaagtatgacgcatgtgtgtttccctgacatgccagtggattgctctgtgcatcggaggcttgggtctgtaggtggagacgagcagattaatgtcctggcggcttcccatgatgcatcccgtgtttctttgataatgccatcttatcattaaatatgatttactgcacacttctgtccccacaccgagttgtgtgctattactcgctctgcactggcagaatgacacacccgcttccgtaatagataatgctggggccacgtcataagtacacaacgtagatagtttttgtattgtaggacaggtttacatagtgaagggctgctgcatctcagtgtgatgagaccagatcaaaaccaaggataggccccccaacattgtcacatttccactgttcttaatcttgggcttttttttttaagataaattttatgcagatagaagtgtcccccatgtcctttaaaaaagatattcatgaatgtgcgcacactgtatctgttgtccctcccccccacttaaagaacacggaggttatccttctgctgggcaaagtgctgctttcgtcaaaggctggatgtgcagtgtctctgggaaggttagctctgtaagaagcacatcctctattgtatgtcgtctgctgcgacccacagatacagtcacagactcattcccttaacatcatttcatggatcaacagtgatggtctctggtgcctgtggagcagcttggagtggaattgccagttccgagagtgtgtgagtgtgagatatgtgtgtgtgtgtgtgtgtgtgtgactgtgtggtggtgcatgagtgatgtgtgagtatgtgtttgtatatgtatgttttgtgtgtgtgtgtgtgtggggtgtatgtgtggtgtttgtgtatgtgtatgtctgaaagatgtgtaagtatgtatttgtatgtatgtggtgtgtttgtatatgtttgtgtgagtgatgtgtgtctgtgtgtgtggtctgtgtcttgtgtgtgtgtgtgtgtgtgtgtgtgtgtgtatgtgtgactagctgggccaaagctttcagatggttctgctgtatatgtctccattatcttgtgctgggattattgatttaagattccccgcatttgttggtgtgtgtgtatgtgtttgtcccaaggattatgcttagatcatgaggcttgcatgacagtttttatacagcaagccatctcttctgctggtcctnnnnnnnnnnnnnnnnnnnnnnnnnnnnnnnnnnnnnnnnnnnnnnnnnnnnnnnnnnnnnnnnnnnnnnnnnnnnnnnnnnnnnnnnnnnnnnnnnnnnnnnnnnnnnnnnnnnnnnnnnnnnnnnnnnnnnnnnnnnnnnnnnnnnnnnnnnnnnnnnnnnnnnnnnnnnnnnnnnnnnnnctcccttccccttgccttgctttgcctttttataggaagaaacatcttgtttcctttgagtttggcttttacttagaaaaactactgtgttgcttccatttgcacccctgcaccttacccccagaatttactctactccttaaataatataaaaacaaatagagactgataatgtgctttttcatcaccactcttctcagtaagaatgtgcacatttgtaagactaggagttagaaaccattgaaggcacattttaaatacctgtccatagtaattttctctgacttaaaaaaaataattattcctcagaagaaggcttaaagtctcagggggaaaacaactcctaaatccgaggaagtccctgaaacttaccagattcccaaggcccctccttctcttgggttatacaacactaaggatgggtgaggaagagccttatcagtctgttcagctgcctgtacattgtgcactttgtaatgtgatcctccgttagtgggcatcacagtgtggggtagtggtctttgaaaaatcctaaaactgttgggaactttcctcagagtttgggacttcatattaaaaatgagggttttaaattctggctggccactgaactttcatctggtgtgtactgtgtcaagagtttcttaaagcaggccctgccctaaccagtgtctgttcacacgaaaccaatcttagctctttgttcccaaatatgttaggcagttttagagaaaagtgcatttgttcattaactatagagtcggttgagtctgtgccagtttgtgtaactcaagccaaacaaggaatacaagtttttaacattactgttcagttggataggatttacagtttgagcaaatttgtagtaatactttctatttactcagcctaaatagggcatagacaatagaccaaagatatgactccactgaagtccagcttgtgacccagttagttactgggataatttataggagtatgtgtgagctacttgcgcatggatgactcaaatgcagctgcgtccctaaaaggtcatagtctgggagctgactcacagaagctaaactcctggaacactctgtataatgtataggcagcaggacaggttggagagtctcttcctcacccacctttactgttgtataacctgagagaaggaggggccttgtgagtctggtaagtttcagggagttcctgggatttgtgagttgtttacctcctgagacttaagccttcctctgggatgtgatttttttttttttttaaagattcatttatttattatatgtaagtacactgtagctgtcttcagacattccagaagagggcatcagatttagttacggatggttgtgagccaccatgtggttgctgggatttgaactcgggacctttggaagagcagtcggcgctcttaaccactgagccatctcaccagccccgggatgtgattttttaagtcagaagaaattactacaaaagggtggttaaaatgtgcctttctttctcttagttactattgaaataaaaacccagttaaaacttagacaaagtagtctgtgtgaatgtcctcgtacactccacatgaattcacagatgtttatcagcaaccactcccaaaggaccccactctgtccccctctccttatccctttgcttaaccatctgaaaataggactccaatttcatattgtttgattcctgcatctttagtggcattggccaccccccaccccattgtaatgtctgttttaagagaaattattttcctaggtctctagtaaagttcttttagttgctgaggcagtagactgctggtggggggacattcagaaccaagatttctgtttgattaactttcgttgttgattaacttctctgtaattttgattttgggtttcctacctgtaaaaagaatactaaactcccaagtttccctttccccagctcctgctctcagaatgacgactctgagactaattatttattaataactgcctaggccataagctttggctcattctctgactggctcataacttaaactattcaaattgttctgtgtctaccacttggttaagttacttatccttccgtcttggcttgcttctttctttgctcctcctcagcatctccctctaatctctcttcattctatcctgagttcagctacctcctcctgtttccttagcgttctctcccagtgtctactttagtctctcactatttcccagaatcctcccacttcctatttcctgccacagctcattggccattgccttttttattgacaggtgatgctcatataagagattgtctgaacactcacctcccaccccctgaccattcatctctactcacccttacaattacacgtgcattcagagaactgtcttagcgtattttaggatgcgttggcgtatacatcctgcccaggatggatctgaagctacagtaggcccctgctgacccctgagagagggaacgctcagagacatgttactttgtcatgttcctcagggacaggctggtagtgcttcctttatctaagaccctggtactttcttctgccttgaatatgctgttttgatgttcatcttacgacttacaggacacacgatactccacttcctacctgtttctcagggagtacctgggccttactttattcttaataacagtagcccttcctctggccccttttgagtattctgctcatgtcagccagtggaaacagccgacagggggcttatttcactgacacactgacaggggatcttgggtgagtgatatcactggcagttgctagtttacagtgtagagcaggtggtgggtactgcggtgtgtgcgttgtcatctcggcagattctggaatgactcgggagaccatccctggcctgaactgcagggagtatcttgacttaattgatgtgggtgtttctggaccagattgtttaaaagcactgctctcttgacttgctcaccacgatggcctgtactttgaactgtgagctgggaaagccctatttgcaggtatcatatggaggacagagggtggtcagctgctaggtgcagcgggaggagcctcccgagacctgctgaacaggctagaggtcacaggcccagggggagtgtggtaaggggcaggtggacatcgatctactctctccctggttaaagtaagagagctatctcctctgttggtgtcaccatagagcacccctcccgagtgacacagaggacaattgcagagctcgtgtgtgtgtgtgtgtgtgtgtgtgtgtgtgagagtgtgtgtgagtgtgtgagtgtgtgtggggtgaactatgtgaatgtaagcagctatgctcactcacagggggaaggtaactgaactcagagagaggctcagaactgaccaatctgggcgcacactgcctgcagagcttctgttagacagctgtcaccctgtgatttgttgactgctacgtcttttccttgtccaagcatgttgtcatgcagtggacatcacgtatgaaggtgatgtattcacagctcagtgcatcttcagagagtagacgtagttgtatgctttgtatctaggtcacagaacagagcagtcctgggaccctggacactgccctcctggttgtcatgtctgccagagcggtcacgttacataggatacccgcttccctgttcagtctttctccctcagaatcgtctgtgttgtttcccttcacctgtttgagacaagatctcaggtctgtggccataaccgtggtgaatacatggttggggctaatgttagctctcaggacctaggctgcccagaagatctacttagatgccagggctgtaagcatctttcgcgcacggttggtagttttagaatatggagatgtggaaaacgtgccttatctgggatcatcctcctgtgcccttcagatcctgggcttctctcacttatggttggggctgtagatgtgcatgcttttccagtgtggatttctttatatgggtgtgtgtgtgtgtgtgtgagagagagagagagagagaaggtgtgcgtgtatgtggcgtggctaggttggctagttaggattccctctggtttctgtcttcccggcgctggcatcgttggtgtccactgtaccacgtcagacgtttttatgtggatgccaggggttgcacttgacaaaccctttacagaatcagctatgtgctcccccctcccagtactgatttctggtaacactcagccatctgctttttggtccctcctcccgtggcacacagatgcttgtgcatgtaatggggtcttacctgcgagctgcacccgtgtggcctttctgatctcggggagttcgaagccagtgcgtgggaatggtgagccttacctcgtgatgtgcggtccagccatctaaaagaggaggaagaagttagaagatgcgtggggcgtttgagtcaaagcccaatgcaatgtagggcaccgagatgaacgggggtgggggtgggggggcaggtactttttcttgagggtagcacatctgtgtcttctgtctccttcctatgtcatggcttccaaacttttacctaccatatgtgtcacttaacatattctggtgtttatgacgactaggcaggagaaagggcagggcactaaatatttaaataatatcggcctccctgttgtctctcttactccccaagtgtaagcgctgggttaatctcattacctcagttgccagtatcagtgtttttgcgtgtgtgcaggcctcaatagacctgtgccctaaaatgtctgtaaatgtggaggctgcaggtcaacctttgatagcatttgtcaggaaccgtccacctaattttttttggagacattctcttgctgggacctggggtttactgattaagctagactggctggccggccagcctcagggagcagcttgtctccacctctgtgcagtccccacactgacctggcttttttacacgggttctggtgtgcagactcagtttctcgggattatgtagtggggctctacagnnnnnnnnnnnnnnnnnnnnccccacagcgacttcttgttcctttccatagacaccggtttttgtttgtttgttttgtttttaaatagaatgggattcttgggtcccctcccccacaactgtaccccagacgtaccatgaccaaaggaagcccagctctagctttctgccacgacccacttccagactgaccttgggccctaaccctaccttcagaaggccttactgtttgcttttttttttttttttttttttgattgcctcagctgggacattctgtaccatgctgatggtagcaggcatcctcctgttcccgactcttctggggtggggagggggcagtgaaagcttttgggagccagtgcttgtttgattctgtttgctgttagggctaagatggggacccatgctttctaccctttggtgtttatttttaaaatctcatcatcaggagatgcagttcatggcatggtgagctgtctacttattgcagataggctttcttaggtcggatattaaagaggacattcttactgctgagaaaatattaaaaaaaattgttatcactgttctggggatcaaactcagcgccaccgatgaggtgagcactctgcccagcccattctggtaacatttttttatttaagatttttatgtataaattatacatacagcgtctggctcctttttgctgtacagattagaagccaaggttattttgggtagctttagttttctcttcctttaactaacagataaagtttatgtcacatggcggtcatctttaagtttggcgggactcgctgcaaagaacttagagtcctttcaagatgccagagtggtggggagtgggttgggagatagtggggatgtattttttgatggctctgacttgtggttgctttgagcctatccgcttccatctcccctctcctcctccttaacacccctcccctgccaccctcattggatcttccccctcttgtttttttttttttttttttttcctaatgcactgagttctgctttgtgtcccctgcaggaaggaggctgccatcacagtcttgtccacatgcttggcgatgtgggccgcactgcttcttggggaattttaaaatcacgttttcccgcatgcagaactgactcctctgtttaggcaggtgtgtgcaagctgaagtttcttcagtctaacagggccctttgcatgttagggaacacatttcttcctgctgcgtggtagctgttggtggtagttgagtaccaccgagtcagtctgaaacaggagattagaaacagggggggggggttgccctaacatgatcccgtgtttcagaaaaccacacaccagagatagcagagctgcgaagcacagggggcagtggcagacatttattcacaccatgtgatgttacagagagtctctaaccagtgttggttccccgagagacacaaggttggacctgggactgctttccacagaaaacttgaaaatgtaatcccagtgtgtggtaaaacttccgaagtaggaagatgttgtctcggaagctcccgtggccatgcctctgtacgatctttcccactcggaaagtttattcatccgattcatatctcctgacccagtcctggggagccttgtcatagttcttttgggcaagcagatctctaccagactgtcttttaaaaaacgcatgtagaatcactcgatctatcttatctgcctgttcatccatctagaatcactagatctatcttgtctgcctgtccatctatctagaatcactcccatctattttgtctgcctgtccatctgtctagaatcactggatctatcttgtctgcctgtccactttccgtctgtttatcaacccatcagtcagtctgtatgatgtcttttcatgtataggatgtgtgtgtttatgtctatgcagttgcgcacgtgccacaatgaacacgagatctgaccccagggcaggtgtgtttccttgcctcctagcccccatctgtgtctgcctgtatcaggccagccggtctgagagcttccacagagtctgttttttctgcacttcccatctcggatgagtatggagattacagacagatacctgcttctttgtccgggtttgagtcttggtgcctcaactaagcaccttactctctccaaggcttcaaacatggcctctcttattgatgaatgcacactgcaggtttaccgaagactggtcaacagtacactccatggaagcacctcagacctgatttctgtgttccagtgtcttatagcgtacctgagggatgaccccaaatatcttcagtaaggagttgaggtcctgccatgttcgccagactgcctttcccctgctgaacatcagtggtctgaacactgttgacaggttttcgtttgttcttaattacagtgacctcactctatgatcaggattgctatcatttccctggtgtctgcatcgattccttcttgatgccttagcagagtcccacaaatgtagtggcttaatactgtatagatttaccatcttaaagttctgtcaggaaagtccagtgtgggtgccactggccagacagcagagtgtggcaggcttgatttccacagcttctagagcagtggttttcaacctccgcagtgcggtgaccctttactacagttcctcatgctgtacagagccccagccgtctttataactgtaatttgctactgttaagaattacaaggtaggggctggtgagatagctcagcggttaaaagcactgactgctcttctggaggtcatgagttcaaatcccagcaaccacatggtgactcacaaccatctgtaatgagtaacaacaacaacaacaacaacaacaacaacaacaaaaacattatgggccagagtaagcggggactggaacaagagggagaaggaaagggggaaaaagaattataatgcaaatatctgataggcaggatatctgatatgccacccccaaaggggttctgaccacagattgagaaccactggtctagcatctgtctgatttctagaggccactgggattccttgctgctggctcctttcttcctctcagttagccatgtagctccaggctctctttgtgacactctggcctcttctctgttttgcttctccactctgaggtttctggaggcaccggccccacccggagaagctaggttgatcgatcagcaaccctaactttgaccattccccttgcagctggtatccggttgctgatggacagacaggctgtgtagctgccggtggatgacatttccatgaacactcgatgtccatctatgtactgcttaagccatgggtcacttttgtaaacgaagtctttcaaaatgcattaaaaagtgtccaaacaggatagctcaggacttgcctcagtgcgtagagcagagagttcagatcccagagtcttgtcagtttcagggggacatgtgcttgtatgtggtggcagagggagtgtcccggctgtctagactgtctgaattagtgagctctgggttcaagtgagatacctagcttcagcatgtccgatagggtgatcaggaaagacacccagtgtcacttacacccacatacacaactccacacgtggccacacacacacacacacacacacacacacacacacacacaccaatacacgtctcaatgactgtagctccctgtgtttgcctgggttggagaacaggaggcaagctgacgtattttcatcagacactaatatgtctcttcgtcaccttcctaataaaagtgtaatgtcctgcctcttcctggccttttactgggttaccgtgcttgtggcatggttaatgcgttggctgcatttgcctggtaaatgtgtaaggaaatgagtgtctacacatacagcaactgctgcctctctatttccttctgacgtgcaagccaggagctgcatcgtgttggatgcaggcagtgtcccagtcagtgagttggggaacattccttcttcatgaagaaacacttaagacgatgcaacccatgtccttactaattttgaaagctagacagaccttccccagtttactacagaacctccagaaatagagataaatgtgtttttaaaaatcttgaatgaagcctggaggctcctttggaatattaaggataagggatgtggaaatgtgttttcgtagctccttacaggtgaggtgctttagaggatttgtgtgtgtgtgtgtgtgtgtgtgtgtgtgtgtgtgtgtgtatacacacgagtgttgtttgaggagtaagctactttcccaaggagtgtaagacttgcatcctccagtcttggggtttacaacagatcttcactctctactgagatgtggacactggtcgtcccgtggccagatactggccagggcggtttcttagtcttcagggaatccttgcttgattcttcctgttcctcccagccaggagttttcctggcctggagcacttcagttcctatctctagctacagtgctgctgccctcaacccccacccctccttgtgtttctggtttctcttgttatggacatcgggagttactgtagggcccaccctcatgacctcatcttagctttatctgaagagactttatttccaaataaggtcaccctcgggactcactggtccttgggaattaggactttgacctatctattgggagggacccactccatcccataactggtatggaatatggaaaataattctgagcaagcaggatggataaggtaatgctgccggtggattggcccagcagagccttcagacagctgtgaacgaacagtctcaggaagtgtgataaggccgagagactggctagagtgccaggcagcttggctgggttcttggccaagtggctgtaattcttggttttcagtctttggggaactatagttaacaggattcaagaccacccttatccccattgcactgggcagcaagctttccaggaggctccttcaggagagattgaggtctttctcctctcttgttacccttccacccctaaatctggaatgctctactacagtggaacacacacacacacacacacacacacacacacacacacagagcatacgatcacaaggagttaatgtagtcttgctcctgtactcaggtgtccaagcagaagaaaaccttcacactggaaatgagtccttaagagcaaggtttatagtcttcctacctctccctcgggaaggcgcgaaagagcatcacacctccacagaacaaacaccagccagctgtctcttaagcacaagtcagagggaagtcagttctctgaattgtcatgctcctagacacttaaagcaagcacaggatgcagcgatgggctgaagggaataaataaccagggccaaatagatgagttgggacagtacaggatacagttttcagcatggtctttgtaacagcatgacagaagctttggaagtgaccaccgtgtccagccgtaaggagatagatatcgcccccatcactgtccgttgctcgcccttctgccatcagtatggcttctcttgaaggagttgatgtttcctgcactctgataagtgtatttgctcttggatcagctttgctcggctgaagctgcaactggtgaaggcagatcagcgaagggagcaggggccagccagctcatagcattgcctcgctggtgcttagatcttgggtgtggttagggagcaagatgatagatagggtagttctggggaaccctcaggtggggatcttgcaacaccttcttatctcttcacacctcagacatagtcgtggttgggcagcgtttcacattgtagcatagttagggtgggtgtgattggcttcttgccagctggaaaggccaccagcatttgctgtgtaaaggaaggaatttgactgttgtggcgggggtgtggggtgggggtgggggtgggggggagatcccttctgttagaaagtaaagcagtaatcttctatctggcaggtacacatagcataggtgggtgtgcgcataaagaggaagaaagactcctttctccaacgtccacagaacccctgcttcccaaactgagacccaggccattttgtttccgtaccatccttcagtcactttgtggcccggatgcgctgttgaaagctggcctagggaaccgaatttgcaattagattgccgtagagaatgttgtcctaactgtcacataaactagaacatttttaacttgtcaagcatttctaagatggagtttgccttaagcacagaagagatgctccttgaagcgcgggctagccgcttgtctgaatgtgtcagggtgacgactctcaggcaagtctaataattacgttagttcatgagttgtcataatgataggaagttagagccttttcatgtttcattaggctatgaaatagacatctctttttctctctgtctgaggcagtataacatcgttatttcacttctgatgtaaacaaaaagcaccggctgaccatggtggtactgtctgtaatctcagccctcagtgggccgaggcagcgaaggatcaggattttaagtccagcccagagcctcagagtagaccagagaacccgcttgcttcttagagacagctctagtttcaggagtccagcagcgtcacactgtatagctgcacacgttatattagctctttacgctttttgtttgagtaaaatgaagtttgtgtactaactgtgtaactgtttagcatcactggtgggagaagggagtcttggttgagggattgcccagatcagagtagcccgccatcgacttgtctacgtggggattgcctagcccatagtaggcagcgtaattccctaggcaggtggtcctgggctatgtaggaaaaacaggtaaatggtgagcgattgagcagcgctcccccatagtctcttcttcagttcctgcttgagctcctgtcctgacttccctcgctgttaggccatgacctttcctcccctaagatgtttttgattcagggtgttttatcacagcaacaaagatagaattagaacgaatatattgacagttgttggtttttattttttaaggttttttttttaattagcatatgtgctggctagttttatgtcaacttgacataagctaaagtcatctagaggagatgcctccataagattgggctgtaggcaggcctgtagtagggcagtttctttttttaaagaagatttattttatgtaaatgtgtacactatagactttcactttcttcagacacaccagaagaggggcatcggatcccattacagatggttgtgagccactatgtggttgctgggaattgaaatctggacctctgaaagagcagtcagtccttttaacagctgagccatctctccagcctggcattttcttaattagtgatttgggcagcccattgttgctggggctatccctgggctggtggtcctggtttctataagaaagcagactgagcaagccatggggagcaagccagtaagcagcacctctccatggtctctgcgtcagctcctgcctccaggttcctgccctgtttgggtgcctgtcctgacttactgtgatgtggaagtgtaagccaaatctgccctctcctccccaagttgcttttaggtcatggtgtttcattgcagcaagagaaaccctgagcaagcctgcatatattaattctgacattccctcacgcctgtctgaaatgcatttaggtaataccctttattttctgttggcactttctgctcagctgatcccttcattcccacctggtcctccatttctaggtcttctgttttcggtatatttccagaactttccgtccattcaagccagcttccccaggtctctgtcatgtgtggtctattctgttaggcttctgctatgtgctttactgttttggatttattcatatcatagtatgtctcagaacccaggggaaatatgtctcaccatggctatataacttttggctaacatttttattatgtagtattttcctcagaataaataagactgtaagacatgatccagtttcagggcacaagaagagctggctctccctggtctgcactccgtgatggttctcacagacgtggatgcctttcccctgtgaaatagcccatgttatccccagcccttattccacatgggtatattttccaaaatttgcttttttttttttttttttttaagtgcgtgttgagtgctcacatggttgcagtacctggagagaacagaagagggcgccagatccctggagctacaggcagttgtgaactgcctgacctagctgttaggaaccaagtgctgtaagatcaagaattagacaaatgggacctcataaaattgcaaagcttccgtaaggcaaaagataactgtcaataagacaaaaaggccaccaacagattgggaaaggatttttaccaatcctaaatctgataggggactaatatccaatatatacaaagagctcaagaagctggactccagaaattcaaataaccccattaaaaaatggggtacagagctaaacaaagaaatctcaactaaggaataccgaatggctgagaagcacttgaaaaaatgtacagcatccttaatcatcaggaaatgcaaatcaaaacaaccctgagattccacctcacaccagtcagaatggctaagatcaaaaattcaggtgacagcagatgtaggcgaggatgtggagaaagaggaacacgcctccattgctggtgggattgcaagcttgttcaaccactctggaaatcagtctggcggttcctcaaaaaattggacatagtattaccagaagatcccacaatacctctcctgggcatatgtccagaagatgttccaaatggtaagaaagacacatgctccactatgttcatagcagccttatttataatagccagaagctggaaagaacccagatgtccctcaacagaggaatggatacagaaaatgtggtacatttacacaatggcgtactactcagctattaaaaacaatggatttatgaaattcttgggcaaatggatgtatctggaggatatcatccttagtgaggtaacccaatcacaaaagaagtcacttgatatgcactcactgataagtgaatattagcccagaaacttagaatacccaagatataatttgcaaaacacaagaaaatcaagaagagggaagaccaacgtgtggatacttcattcctccttagaatagggaacaaaatacccatggaaggaattacagaaactaagtttggagctaaggcgaaaggatggaccatccagagactaccccacctggggatccatcccataatcagccaccaaatgcagacacttaatattccagcaatattttgcggaaaagaccctgatatagctgtcttgtgtgaggctatgccagtgcctggcaaatacagaagtggatgctcactgtcatctattggatggaacacagggcccccaatggaggagctagagaaagtacccaaggagctgaaggggtctgcaaccctataggtggaacaacaatatgaactaaccagtacccccagagctcgtgtctctagctgcatatgtagcagaagatggcctagtcagccatcattgggaagagaggtccctaggtcttgcaaactttatatgcctcagtacaggggaacgccagggccaagaagtgggagtgagtgggtaggggagcagggcggggggagggtatggggactttctggatagcatttgaaatgtaaatgaagaaaatgtctaataaaaaattgaaagaaaaaaaaaggaaccaagaactcttaaccactgagctgtctctctagttcctattagatcagatcagctcctcgtctgctttgagtgaagaagtttgatttttttctcctgtaacttttaaaatcatcaccatcatcgttgttataattaattcagcacttcttaggttggttcatgatgtatttagctgtttctttggactttattgccttttggttcctttgaatctaccgtttcccgtctgactaggtatttgaggggttcatggtatgttatgtgcacaaaaaaactttctatacgcacagggcaatcattttccaggcagctatgaaggagtcggcttggtaccctggagagaataacaatatttagtttttcagagcacctggcctgtttcacactgccatctatctgtactaagtggagaagtcccatgaatctttgttcttgtcaagattttattttatttttattttttttaatttgccgtcttaattctcaccagcctagggtgtgccaggtagtggtcttaatttgtcctttgttagtcgctttcgaggacagttgtgactgtttgaaagtgtggtccttcaggtagtgggcatcacagcctacctggatcgttttcgcattgaagttgcttttaatagtattcaagtcttccttggcctggggagtggatgggggccccgagtggctgaccccagtgaaaaagccccttgattctgattctggggaactgcctctacccttttctttaaattttagtttccttctgtcacgcacgtgaggtctgccagcttccaacttgcagttttctcttctgccctttcctttagctgaccacgccctttagttggccccgccccttgtctggccccgccccttgtctgtcccctccctttaaccggccccaccctttaactgggcctaccctttagctgccccgccctttagcattctgttgtcactgccttataaacaccacagttcctaaaccaggaagatcacatccaaatcttctcctcattgttttaccacttggtttttgtaattggatttttctgatttttgtcgttccctagtgaacagtaaacattgtgcacagagactggagcccacagcaacattcataccgcaccacctcctctgtctgggcatccagctaaggctgaatgtgtgtaatcggcaagcggtgtaatcggcagcttgacccgctgctgcagtttgccgggatgatgtctctcctagccctgtaggctgtagattctttcagctgagggcttctctctgtgtccacggcctgtggtccacactctccagggccttaggtcccatctctcagttttgggagtcttcgtgcatctggcctgcagtgggggagctgtggatggttgtgggttgggtctcctggcttgggacacagtgaaggctgagtctggcttttggttcctcatagagtgctgggaaatgcagccctggaggacagggccttttccacgaatctgctgctctcctcctctggtaccaaaactcttcctcaagtctcagtcatcttgggcagcacccatgggctgataaaacttggaaactgttagggttcttaagtctcaagatcttacttgatatctggaaaacaaacatgtgcattgcctgtctttctgtcctacagtccaagaccatggtttgggatagagtctgagtgtagtagcattgtagctggatgtctgtctgtctgtctctgcctctgtttccctgtctgtgtgtctgtgtgtgtgtgccctggaatagaattaataaaggctttaacttgctgattggtgttgctgcggaccagtggctaagagaggcagggagcatccgccagccactagggacaggcgaggaatcataatttgagtgtggaccgggaatcctctctttgagcatttccttagaatgctggtccgcctggcttgtgctgggtgtcactgacacactcaaacagatttctgcagaaaagtggcttgtgttgataaacctattggtataaccagtttgtaagctaatcccataagacccgccagctgtcagtcgcaagggatccggttaaattctgagcatctgccggggcagtcaataaatgcaagatgcatctcacacataccagttgagaaagaagggggctttacccggttgcctggcaatgtgtccatggtctttgcaggcctaacagtatgctttcagatgctaatcaaactaagggtttttttttcttccttttggtttggtattgttgttgttatctttggaggcaaagtcagaactctgtagcccaggatagcctggaactcctctcactgtgtagcccatgattgcctcaaactcagtaccttctttagtccccccagctgctgggcaagctttgaagctttttgaaaacttagatcttgggatggcaaggtggctcaggaaaccagcgagcacgctatgaagactgacagtctgaatttgattcctgggactcctgtggtgaactcagatagatggagtcccacaaagatttcctctgacccatacatgcttagcagggcacaagtgcagcagcactccctcccccaaactgactattctcaaatagcgaataattttatttgccacagacccagtttctgactcccctctgtttacttcttaaaaccttgctcctttgtctggggagaccggtttagatagaaaacaccaccttctaaaacatactttgttcattgttaaaaagtttttctttgttcaatagagcccttttttaattaaaaggacttttagatttaattcagaagacttcacccttctagaaggtgtgtttcggtggctgctagtgtgttcaggagaactcttggtgccgtccagctcagagtatactcctcagctctgcaagcaacctgggcacagcggtggccatttatccgctctttggcaaccccaaggcccgtatctatctttaaagttcgtttacaaggcagcgcagtttgtcattcctctaacttgacgtgaaacgatgagacagaggaggaaccactggaggaagctgaaggctggtcaccagtgtcagaagtgttacccagaagcctctgcttcggccctatcagccgtaggcacgtgcgcagagcagctagctggtcagcccagcctggttggagcctcctttattgcgtgtggtgaaacgcccagccatttaagataaggtgtgatcttgtgtaagtggtggagggtggactggtgctgatgctggcttgtggcaataatagatttccaaaggctaagcccagcatcagcttcgccagctgagcagggtccttctgcttccttaatgtactgaatactgagagttggactgggttggtccgaaccagaagaaccagtagccctgtagatgataggctcagatatctagagtaggtctgcaaatactttggattcttgcctatcacatgagcaggaatcttgaagcttctagaagaagagtggctgttgatttaaaagataaaagttgagttcttagctatcttccttgcttgttgtgggggctgggggagagatcatgctaaaagcaagtgaagttagagtcatgtaagagaaccccaaaggactctgggactgcttctggtgtccttggtcatggatgttatagctagttgagcctattcataatggttttcccaggaacttccatgctgaccggtctccgagtgcccagctttcctgtaattcaggatgtcagtcttaagtattaacaagtgtacttgtcataacttttctagggtcattgggaggcaggcaagactgagatgtactgtcattgaaaccatgatgtgtgtgttaggcacggtggtatcagggaagctggtatctaggtggtggcgggcgtggagtgcagtggcggtgggccctttcagggtaaaggcggtggctgcctagtgtcagactctttccctgtccttgcggccatctagtgtcagcagaggcttggaatttatgcagatctctctccctggacttggctgtgtgctttgtgcttgtaaacccaacagtagaattacaatatctatttgaaataggaaggcgctggggcccttccctgggatctttgtttgattcccagcacccacacggtaacttacagtagttgtctctataactctagtctcagggaaccaaacactgtcttctgggttccgcaagcactgcacacacagggcacacaggcatccacgcaggcgaacacccatacacataaaacaaaaatttcaaaattaaaaataataataataattaaagggatgtatgtggagtaaatattttgaaatgttggcgtcctttcctttgtgccttatttctttctaaaagggattttcctggagtggttatgtcttctgtttactaaagctagtactctttgttatcacccggaacaccaggcctggcccttgttggtggagtgtttccagtgtgtgttcaattcagtaatgcctgctttggcaggcaccccaccttccatccctctatccccccccaccccagcacccccaagttcccaggagggaaagtaaaatgtaaaagttttttttgcccagccccataggaggtaccacctttaggatgagtgctcttcagggctcggtgcctgtcctctgtaacagttccatgaacacacagatgtgccgaggttcattcaaggtggcagcgttcatggcggcgggaagggatactctatcgttgggtgcacagcacagtctgggtcctgtttgtcaggagggactttgcgtgttcgagtcttgatcttgggatgttccgtgaaatccagtctttggtaatttgacctgccattttgaaggaggatcatgggtagtctgcatgatcatggactttacacagagtcccctgggctcctagtgacgttgctcttggtgcctctgctgaagtccactgctttgtaggtagggagagagggttatgatggttcacggctaaagacagagctcttgttaaaataggcacctctagaaataagagctgtgctacattcggggaaaattccacgttctcaccacacgtttttgtttttgttcttttaattttttcaaacagcaagccagggctgagcaggaagaagaattcatcagtaacactttattcaagaaaatccaggccttgcagaaggagaaagaaaccctcgccgtgaattacgagaaggaagaggagtttctcaccaatgagctctcccggaaactgatgcaggtaagctggtctcacctcacggctcttccctgctccacccgcttgccttctgctccctctccaggaggagtggcttcatagatcgtttggttgtacatgtgccgacgcaggtgttgcgtgggttttgtggggtttcagaatagtggggtgtggatccttcagacggtgcctctggagcccacctgctcgggaagggtgggagtgtgtacctttgagtcctcgcaaacttgggtgcacctgctgagcgtaggtagcatcgtggaaatgcggagctcagcatccgcaggaagattcctttctgcattgctattgagtctactgttgagtcacagacatctccccagatcttctgcactcagatatgtgaccataaactgagggcatgttctagggggtgacggatcgggtcatgctgctgctgttagttatagagtgaagccacgcacaacacacaccggagggtctgggtctgccttaggaactcatctgcctccctgcttgtatcacagaggttactaccaaaatgcaactaaaactccccatggcactgctcccactatggttgtcaacctgtgggtggcgatccctttggggatgaatggccctctcacagggtcacctgagaccaccagaaataccagtttacattactgttcctaacagtggcaaaattacagttatgaagtatcaacgaagtagttttatggttaggggtcaccacaacgtgaggaagtgtatctatcaaagagtcacatacagcatcaggaaggttgagaaccactgttctttggaggtagtgtgcatgttaattcctgttaatttaagaataaataagagaccgagatacagggggtagaacgtgtttgtatttcctgttcaccagtatcacaggcaggttgcattcattacaacagagagtgcttcagccaggtcctctctaagaaagttctgctggcttctccctctgctgggctctatttatttattttatttaatgtttatgagtacactgtagctgtacagatggttgtaagccttcatgtggttgttgggaactgattttttttttaggacctctgctcgctcctggtgctcagtcccctgcttgctcaggctcaaagatttatttatttattattcataagtacactgtagctgacttcagacgcaccagaagagggcgtcagatctcattatgggtggttgtgagccactatgtggttgctgggatttgaactccgggcctttggaagagcagtcagtgctcttacccactgagccatctcgccagcccctctgctagggtcttagctccaggaagctttggtgcacagaagctttaagcgttaagatcgctcatccaggaaatccctttcttgcctttttctttcctagtcataaattaaagacaatgctacaattttattccagtagcggctgtggagagggactgatgcaggtgccgggaactgtgatgagcagatgcttataacagaatgttttgcataattcttttaaaattattcatttgcattgtgatttagagagaagagaggggaggctaatttgacttactgtgacccattgttgccagtggtagatggcttattcttcatgctgtttctagacgtgccacggctacagcttgtttctcctgtgcttagctgcgtccaatcagctgtgcccatttttaacaacgcaagaagcccactttcttactgaactggcattgttagtatttggctgagtcatgttaacagtgagaacccagcaggtgagctttgctccccgcccccccccccattcacccttcatgacccattgcctttccagtaacactagtgcttctaccgacaagattaaaaaaaaaaaaagagtaaaaaccgtaagagccgtaggaagcggccatggtggtatgccaggcacaagatggcttggttcagttgggacctcccagcattttacagatgcagctctgccctagagaactgtggtgattgtctccacaacccttcaatctaaatatgcatatatgaggaacctaagtccacaccccttgtcttagtcagggtttctatccctgcacaaacatcacgaccaataagcaagttggggaggaaagggtttattcagcttacacttccatactgctgttcatcaccaaaggaagtcaggactggaactcaagcaggtcaggaagcaggagctgacacagaggcaatggagggatgttccttactggcttgcttcccctggcttgctcagcctgctctcttatagaacccaagactaccagcccagggatggcaccacccacaaggggacctccccaccttgatcactaattgagaaaatgccttacagttggatctcatggaggcatttcctcagctgaagctcctttctcggtgataactccagcctgtgtcaagttgacacccaaaaccagccagtacacccccaatttttctttctaaagacaatcactcatgtctgaacatactaaactgtttctgcaaagtagtgtgtgatctgacacttcatggggcagtgtctggcatcacagcagagtgtggtcagcaggcatgtctcagaacacattgccaaactctcaccattggctgtagaggtatttagcatgttcctagacagattctcaagagttttgccttgggtttgagacctttaggtggcggtcagttgttgacttgcctaaatgatgtgaacaacactttgagggtgcaatttgatggcgtcgcacgtgttggtatccgacgacatcactgtcctctgtctccagaatgttttcaggctggaactcctaacccatgaaccagccacactgcctcagcctcttctggctcttgggatcttgaaggcaatgaatagtgtgtgttgcttgaaggtgggcacctctggctcatctcccattttacggttttataaacctgtcccattagacatcacccaggatggttggtcttagttgaaaacttggcgggatttagaatgggttcaactcccagcaaccacatggcggctcacaaccatctgtcatgagatctgatgccaccttttggtgtgtctgaggacagctacagtgtactcacatacataaaataaataaataattctttttttttttaaatgagcataggagatactcaatgagaccatttccacccaggcttaacggcggagggaagaccttccctgattgggtggcgccatccccatgggctggggtcctggagcaagtgagctaagcaccagcacttagtttcctccctgaggcgcagtgggagcagccactccatgcacacccagtgccacacccttcagtacaatggacgtatcccctcaaaccgtgagccaggcgtctctcatcatagcaagtaatcagctcggcacacagatgcccaagaccccgctctattgttggccacttggaggatttgtagctacaagaaaatgctgcctgggtttgatccttgctctccaggctctcaccacacgtttcctttgtcgaatcccgagactctgaaaaccacccaatgtggagataactttttccatctggaagatttttttttttttaggataattgatgccagtaggcttttccaactgtgtaattaatttaatatggctttctaggtgttcacttctgtttacggtgttttggaataaaaagctggctaaggggaatggcgccgttgacagacatatggcggaattgactggtctctgtgacaatgcctagcatatttcacccgcaggccgccggacacctatttataggacagtgtggcttccctgtggtgattgggcattttaaaaattcatatttcagagagggattcctgaggacaaaagagacttgttagcccaatggtgatctgcctgcttctgcctcacctccaggggttgaagggagagttgccgctataactggtcttgagatgcctttaaaaacaaaataatccagttcacgtcattgtagacgagagccctggagatgaccaacctgggaagcagataaagctaaatcctcagtaaagaaagctacatactacacactacacactacacactacacaacacacacacacacacacacacacacacacacagtatgtagctcttttctcttggggaggcgggagtggtacatgcttttattattatttttttttattttatttttttgaggacagaggccaggtcccctgggactataatcacagaggaccaaacctgagccatttgcgagaacaacaagtgcttttaaccatcgagccaactctcccgcccaccgcatgcttttctatcttgtgaaagctttattctgagaaatgtacatctttctgagcccaaagtgtgagacctgggacccactctctgactactagagaaggaaaaataattcaggggaggatacagagctgctctgctctgtggccctcagaaggcacagtggccaccatttgcagttaaaatgttcatgacgttctgatgagcaaactctaggtctgatatgagacgcacacgctagaaaaaaggcagctctccggatgtcagtagtacctctgctgggtgctgagcacacagtctgctatttattaatttgttgccttttgaaggaggctcttgattctcctgcctcagcctttcaagtgctttcagtcacgcactgccatccccagctaggttatagccatcacctgtgtgtgccttttcttgccattgtatacaggctgcatgcatttctataaccatacactttgtaaatgggatttaaaagttctgtcagctaaatgtcctggccttttgaaagctccttctgccccatgacttcagccctcagagccctgccgtcaaggtcaggagttgtattgaggcctcaggatcaggcttgctcatgggcaatagaagtttcacacttgcctccatcattaagaacgggtgtattcaaaatacctggtgggattcgctccatgctgatcctctgttgctaagagcaaagttcctgattgccctggttgccaactacggctcttcagtgctaacttggcttggctttagcaactggacatctcccacctgatgcctcaggttcatttcctgtgtgcgtgcttgtgtgtgtgtgtgtgtctgtcaccctgtttctgagtgttgccttcactcctttctataaataggatactacaaaaagtcaaagaaaattttgggtccctatctttcaccagagaataattgagggtaataaagaatgctacatactacacatccttctgtcttagttagggttttactgcagtgaacagacaccatgaccaaggcacatcttataaggacaacatttcattggggctggcttacaggttcatagcttcagtccattatcatcaaggcgggagcatggcagcatccaggcaggcatggtgcaggaggagctgagagttccacatcttcatctgaaggtggctagcagaatagtagcttccaggcagctaggatgagggtcttaaagcccatgcccacagtgacacacctactccaacaaggctacacctccaaatagtgccactccctgggctaagcatattcaatctatgacaccctcagtttttaagaacctgttccagttttcaagttgtataccttaaaacaacaaataggtttatggtcttgtaactttgatctgcatttgaagtagaatctggcccaggggaagtgtgggcgttctggctagaatagaaatgacgaaatagtcttacgctagtaagtgcatcctatattttaatcacgtctgtatatgtgtgtattaagtgtgggtttgtgcaggtgagtgcggtgccttgcagaagccaggagactacattggatccccttccagccagaattacaggtgactgtgagctacccaacacgggtaggaactaggaactgctttcagatcctcagcaagagcagcgggtgcccttaattgctgagccaccatctctgcagcctctgacatgtcatctttgttattgagttggtccccgaggttacaataccttctagaattaaagtgggtgaggcagtttcctagcatctgtagaaacatgaaggctgcagaactgagtatgaagccgttgggaccaggaggttgtcccggtgcttaggtgggtgtgggctccttgcagaagattgacagcaggtgcttcagatgggcatcgcagggaagatggatgcagagtgcttcagactgggaccaggcagcagtcactgagacaaagcaccatgacccatgcaacttacaaaagaaagcgttaggttgggctcaccccatgccttccactccctctcagagaggttatgccttcttccagcaccacagaacccttgtgcatggtttgtccccaagccctggacttgagcagagactccagcctgtctccttttcaaagatgcacaccagcatttgaggccacttcctgccagctccacggaggtggccatgcctttcactgggtttgtgcagacagctaaatcacacgatggactgacgctacaggaaactgttttgttaatttcagggtcaccgaggtcaagcatgccttggcatccgttcagatgacagcttcgcctcctgtgggggaggagaagcagccttgatgtatgtctttgattaagttggctggacccgtggtccttgtgcccagtggtgttcagagataatactgaccaaggagagattgctttcacattatagctatcaaaacagttggaagatttgtttttctagttgcttcccattcctcattaccagactcttacctctgtctggttttcatttccttccatggagcgaaggtctgtttttttttttttgttttttgtttttttgttttttaatatgttccattcacaaaacatctgcaaggagctgccagattgtttaaactgcatttgaaatgccacagacccaccagcggccaaagtataaaccctaattcccctgtaaatagcatgccaggagctctcagcggaacgggatcagtgttgggactagagaagatgatgaagttctttagtaataaaacattgccgagtggccggagaggtggcttgtggcgtagagcgctggctgcagttccactggacgcaggttcaatttccagcacccacatcatggcttgcaagcgcctacaattccaattccaggggatctaactcactcctctgtaggcactgaacacgtattacacatacatacacgcatgctggcaatgcataacgtaaatgaaaatcccaacatggccaggtttccctgaatgtctgtgcgcatgcgtgttcacacatgcggtgcgtccctgagtgggtcagatgactctgtgtgctgccttcgatatcagatacaagatagagtagatctcggggggcggggcgggggggggggtaaaggttaaaggaaacgaaaaatcattaggtaaagctagggcaagagcttgctggactccggagagggcgggaagcattatttctagttggacttgtactcttgtgtgctgacagttgacctgaaagtcgatgagctttagctggcagtaggaacaccttttaaacaaagaggctcccaggaggcccctgtggctggaaaagcagttcccgttgtcgaaagtgggaaagcagctggcagagtaggttgatgtagaaagaaggtcggaagcagagttggagatgtctagactttggatggacagagcaggcctttggacagatggcctggctcagtggagacatctggtcaagggacagtaaggaagggccaggggtgttgtcagcaggacttacaggaatcaacaccatcaataagagatgtgccaagagaagagggtccaagactgcaggagatcaagtaaggagggccacaagggaaagccacagagtgggacaaggtgtctgacaggtatagcttctctctgatgtgggacagtgggacagacagacagctgggaggagaaatggcacagaactggaccacggtgctttcgttgatagacagctaaactggccgggtcacaagtaagtaccgaacccattagtaatcaggaaaggccctgacttcctattgcgctctgctcagagagaagcgaaattgctgggccgtctttggaaaagatttgcatttcccaaataagccggaaatctcgcttccctacgacaacaacgaagatgatgacaatgtcagcagctacgttcctgcctcgggcgtcacacgtgtctgcgtctgtctgcgtgtttactgcagccctggagaggaggtcctgttgtctaccactcctaaggaccaccaaccaggaagaatgcggtgcctacgaccgacctgactggtaaaggatgaaggctgcttactcgttgagttggctgctggacgtgatgagaatatatgagttgtggtctaactcatcacaagtacgttgagcagaggaagctgggtagaaagagcacaaagtcaggcaaagctggaatctaaatatatacgggcaggaaaaaagaaagaaaaagttaatagacacaagggcctgactgccaagagcctcgtgctgtgtgattgaactttgacaccatcaaggtcttgttcttggtattgatctggtgccctcctaacggtgcccttggtacataccgagttgtttaactcatccggaagctgagcttagggcaaatgggctcacaaagtgcagtgccatcattcagacggccactgtgtgagctccagaacgcttcgggagtcctggtcactgtccttgtgtaggtgttcggtcccagaaggctgatacttggtgcaggcggcagctcatgccagtggtgagcagcttgagggtcctggcctctttggggttgtgtaccagataccccgcatctcaggtaatgacattataattcatagcagtaccaaaattacagttatgaagtagcaatgaaaataatgttatgatttggccgggggtggtcaccacagcgtgaggagctatattaaagggttgcagcattaggaaggctaagaaccgctggtgtacaacagggcaaagggtttggaaggcagaggccttagctggacccctgcctttctttccccctgacctgcaaggcttctgtcttattacacctcatggaagtatactggacgtctggactcagactccttgaactatcctccttcctccctcctctccctccttcctccctcctccctcctctccctccttcctccctcctccctcctctccctccgtcctccctccttcctccctcctccctcctctccctccttcttccctcctccctcctccctcctctccctccctgttctctcttccccctccctgctctctcttcccccctgctctctcttccccccttgctccctcctcccagcttcttaacccacatcacatcaccgtgggggtgtaggccattcctgggtttctctctttgaaccatattttctgtcctgtctcctctgcagagaaactccctgccctgctttgacttgcccttcactgagaggtgacagaagggaaccacagcaggccactgtttctgctctctccctgggggacagtgaccgttcaagacactccagctcagggtagctcagtagtttcccaatggttagtgcaacctgggaccttgtcctggtgacgatcactttaccgtccggttttcctaagggcatagctcttttgtgggaaacctaagatgcatagccatcacagcctttgttccctgttcaccatgcagttgttagcggaaatacctccccggttattggcagcagcggaacatctgtctaaatacgacttcctgccgtcagccagagcctctccgctctcggattaacattctcttgacagatgattcttgttgggccagaagtttttccgagttagattccattctttattgttttaatttacctggggcagaagcaataataccttttttttttttttttaaggaaaagaaaaattgaaggagccatttctaggtaatgaaatggtggcagttgaaaatgtgtcggaagatctatttagaaacacctttatgcaaatagattaaagagtttaccggctcaagtgtctcttgcctttagctcatagacaggcaggcctaacgtttatagtctgtttcacggcacagggatcttactgtgggtttacctatcacctgcacactacacacgcccaggatgggagttttttggtgaaggcggcccttttttcttgctcaggaatccctgtgtccgacacttcaaaagctcttcctgagctctgtccacccgtgtagctttaattactgcacggctttgcagaacctgagttttcaagagcgagctaaaaatagctagtcactgtaagcactacctcaggtcttccttcggttgtgtgtctgggtccctgcaagggcgaccagcttggttttggagggggtaggtacatcagcttttctattcaacatgccctgtggtggaagatggcctcaggttgaaaaggtgcctttaaacagtgcatgcactctctgggtagcagaattcctaccaaaaatgtaagcatctatcctgcttggggtgatccggcgagggtcacccctcaaaccctcccgagggaggctggctggcctaatgtttcttggatttaatcgtttgattctgccttcctggtcagtctgtttgctgagggtctgggctcaagagcatggtgtggttcccaagctctgttgctctcaagcgcattgtccccttgacaccgtgtggtgtgctgttgtgtgttctgtgtaccagggtgagcgcaacggggctggcgctcctgcagaatgtacctttcatagaaaacgttaggcctgtggacttcattgcctttagccccctttttctgtctcttctgggctctgaagcagcaagtgaactctcactggtgattagtgtccgtgtcctgtcatgtccctgtccccccaccccccctcgagtgtcagaaaacatggctggttattagttggaaatcatggttgcttattagtgagaactctggcctcccctgtgactccctcggtttctttaatttccttttggtcttgaaagttgatttcatatataaattatgtaaaacttttacttgtaacatcatagctttaacttttaattgcgagtatgaggttccacccccccagcacacaccctgggttcttcagcgagacggtcgggtcggtcggaggcagcagtgggcggcagcgtgatggatgagttcattatgcaaagagaaccaatgtcgctgattgctccccaacaccggcttacatgcgagcaccttgggaaatagcataattccgaatcatttgctaagtgtatttttgggtggtgacaactcgttctatagacatgatgcagatccgagtagatcacagttaattcaaatgattggcggtgcaaggctttcaacctggaaaattcctccggcctgcagcctgtgaggtagctgagtggcagaaggcacttgccacaaaagcccggtgatgtaacttcattccccagcctcacagtggaagaagagaacttagccatctccttcgacttccacacgccattggcgtgtgtgtgcccaaatttcttagcctctctgatcacgacgtgtaacttaaaagagattgtagtacgtgttctaaagtatgctagattcccagttcctctctgcagagattccctgtagcccctctagaatagatttcagtgtttaatttatggtttgatagtttgctctttgagtgatgcccggcctttacacgacagcagctatcggttgtgcccgtgcgagcacaggcgggcactgccggtcttctgagctgcttcctagttagcacagcctctggaagcatggattcgcacacacggcgtcatcactcactgtccctacccttgttgttctgtttcagctgcagcatgagaaggcggagctggaacaacacctggagcaggaacaggagtttcaggtcaacaagctgatgaagaagatcaaaaagctggagaacgacaccatctccaagcaactcaccttagagcaggtgagccagggcgggcaagcgagcgtcctcggtaagccacctagggaggcaccaaggagtggaagggagagagacaccttccagctcttccctccctcatggggactgtattttccaagtgagtgttggtgagttcacagagcccctgctcactctctctcacactctctgtctttagccacagttggtgttgcaggagctgtgcgagtgatatgatttagagtnnnnnnnnnnnnnnnnnnnncccccacgagagtgttggaaaacatggctggttattagttggaaatcatggaaagggagagattagtctctgtcctacgtaaggcaggcttgtagggagcaaaagctgctttcaagggtcgttcagaagaaaacgacgaacatcttctgtcagtgatctcgcaggaactcagccaccctcgtagagacagatactggagtgataggcttgttcagcccatccagggtcagtcacccccatgggccgctctcatttttctgagccatgggtctccatttgcaagtacagcagggaagactgaaactggggtccccagactgggaggtacaaaacttgtcaggctccagtgttcacgtgcctgacaggttggtgtgggtgtccattccagagctagccttagaggcacacactgcccttccaatcctgtcaaacacagccatggcagccgccatccttctgttgaggctgcggtgtccctgggcttgggatctctggtgctttttccacatctgtatcctcaaaagacatttccctaagacataatattaaaggtcgtctgtccatggtgtgcggctccgggcttccacgtgaagctgagcagatgggttaagatgtcccagctctgtcttgcgaacactgaatgataccatgtaatgatttgttgaggccccctgagcgagcactctgatctctctcggtctcagtgttttctgtttgtccatccctgtgccaactgtgtctgctgtagctctcgttcgtcacctgtcttgtttcttgtggaatgttttccttacatgcgtgttcgtgtgctgctcatgtgcctgcagaggttagaagagagcagccttgtgtccatgtaacaggaattacaggtgggcaagcaccatgccaggctgggaactgaacccagatcccctggaagagcaccactgagccacctctccagtcccctgtagctctagatttaacagtttgcttgagttgaaaccagggtgggaatgagaggttgggtgtattgtcttgttatccacacgcaaaggtaccaaaggcaactgattgtctctggggtttgtggtactgaacggtttctttaaaaatgcctttgtcccttccttgttaaattgggtttctaagggttggttctttcgtaagcacacctagagcactcttgtttctgttgatcacctttcaaacctagatgcaatatgtaagttgtagaagactcaggtccccaatttaaaaacactattgttccactgtttacctatagcattgctgtgatcaggcaaaccaccctgcaaagtgaacaaatccttgaggatttgtggtttaatccatgatacaagtcccaggcgtcgaagccatttaactgagaggccccagggagctcagcaggggtctcacagttcagcatccaccctgtgtgtgttcataggctgtgacctggttctccaggggtggccacaaggtggggacagagagctggcttcagcaggaaagggctgtggcctcacaggtggctctagggaggtggagaaagtgagtgttgtgtgacagacctattccaggggagacccaacatacttgtccattcagcccagagagggaacttggggcagaccaaaatactgatatcaccaacatccaccttggtgaaccaatgagttttttaagaagttgtttacaggaatatgataaggagttactgatgggagcagaaatagcctcaaagacagcttggtcgacaaggtttaccccctgcatgggtgacagttcacaaaagctcagaacctggattgcactgacagcctgcaggcagcttaacaggtttcagcatgttctttccaagtgactaatctggactgcttctctcaggcaggccagctggtttctactgcttacagacttctggactagtctcaagtcttctctgaagcatgggtctcttagagagggggagcctctgaggggaactctccattgttttctccagcccttggaccttagtgaatctggtcagtttcagggacttcctgaaactcttgagttgtgtgcttacattcctgcttaaagagctttcctggaggatggaacatttgaatctaggatgaaacttaagacaaaaatgggtatgaaggcaagactgcaacagggatggggctacccaccatctatcaggctagactctgtgtacttaagtgacagcccaaggagcacattctgtctacgcacatgcagcttactaggaaagtgtctccagcagagtgttcctccacaaagcctcttggtggaagggagtctgagctgagccaggtcagaattacattttaattaaagaagagaaatgtagcattgtttataagttctctctcattcatccaggtaggtttgggctgttaagtgtgaggaacgataatgcattctcccccccacccccacccccccacccccataagtaatcttagctggtgtttgggagggttgttctggttccttctgagtctccgtggcatcacctgagcagctctgtacttggctctgtggtggtccctgtgtgtctgtatgggatgctgttgcagatgttgagatgaagcccagctccccggtttatctgggccttctgcgtacttagctcaggaaactgtgtcataagaaatgcagtgctggggcctggagagatgattcagcagttaagagcactgactgctcttccgaaggtcctgagttcaaatcccggcaaccacatggtggctcataaccatctgtaatggatctgacaccctcttctggtgcgtctgaagacagctacagcgtactgacatataataaataaatcttaggggctgagtgagtgggggcaggagtggggctggatgagcagaggtcgtgagttcaattcccagcagccacatgatgcctcagaaccatctctacagctacagtgtactcatgcataagataaataaatctttaaaaaaaagaaagaaaaagaatggcagtactgtgaaggtggtccatcaactagcagctcggcagtgtggtgctgcccccacagtgtaggacctttgagaggtgggacctgatatgatggatataggtcacttgggggggggccttcaaccatgatgtaccatgttgaggtgcaaagcaaggggccctcttcggtcttgggagtcttagcctccaaaactgtatgccagataaactttcatgactccatagctttgggtgttttgtgacaggaacacaaaacagaccagtcaaagagagggaaagaaaggggggggggcgctgctccacacccttcttggacatttaacaaagcagaaaaatagcagagtaaattcatagtcacgtgactctgctcacactagactgacacacagttgcatgcctgcctgccctnnnnnnnnnnnnnnnnnnnnctgacacacagttgcatgcctgcctgccctcctcctccctccctccctccctccctccctcccacagttggctccgtgtaactccagcggttattcacgggattttgagtgtcctcttatgtgtgctgtctctaccctgtccgtatgagaagggcgggttccaggttggtgtggtcatttgatttcattaacaatctataatgccagcttcccagccagagtaacttactgacttcctggagtccagtctccttcccttctggaatgggcactgtgacctcaggcctatagcatgaccccaagcctatagtatgacgaacccttatgtgaaacaggcgtactatctaaatcgtagggttaggggcatgtttactctgctcgctgcctctctcaggcttcgtgtggatggaggctctcatgcccgatgcaggaggaatcagttcacacggtaacccaatcacggacccgtaatctcaccctgtgtgtgactggtgaatctagaaaggtaagtgctcatcggctgagctttggttctggaatcatgttctggaaaatatgggtcattaaatgatgagaccaatgtcaccattcagcagtaagctgtgacccagcaggtggaagaatgtgctcctgtgttgttagaagctgttgccagaactttcagggcttcttctgcagagaccactgtctgctgtaatcctccaggcctccctgtctgtccttccggcaggcaggtgtctgcacatgttgtccggtcattttgttacagtcctcactttactctgttgtttatctgtcgtaaactccccagagtgtcaagggagcagaaacttgactcatccagggatcccatccccagtggcaatttccctcctggaatcccagctgctgcctttaaacaaccaggggtgatgggcgggagaaaatgggttcacagttaagagtccttgccacttaatcctgaggatcgagttcaaatcccatcacccacataaggccgctaattcacaaaccccctgtacctccattgagggatccagctcgaatttctgtcctgtgtggacacccacacatatgaacatcagtacagctatacagacattggagtagccacacataataagtgaatcctaaagggaaaagttgtcacctgtccctctgggtatctggggctccctgcttccaggaacacgagcaacagatgcctggctccttcctcagcctgcttgtccacgcttcatgttctgaggaggtcaccgtgacctggctccgtctcccttgtattttgttttcgcttgaaccacagcgtgctaattggacagcatgagtctgtttggattcatgtggcccggagtcttgttctgggatgacaggtggttcccagtggtcagggatgaaggaagagccgggcaggggagggaagcagtcactaggcagcagagaagactgagaacacagaaaagaaaggcacggccagagagagacacccacgtccatccttgttcagggaaacatggcctggcaggcggaagtgggagaaggatgctccaggccagagtgtcagtaggctctacaaagccatcctggaacagaaatgctgggggatgtgggaaatggaatcttccctccctcccactagaagcagcaggattaccaaggcataggcttgtcattagggctagtcatttagctgtcctggggcctggccaggcctccgtgctaacagtgtcccatggtgttactctcagtttttagtcctagcaggtgactcacagggcccagcttctgtggacagtgccccagcatcctgtgccatctctaactacagaaagctgcatgggccagtgtggcacactgactctcagcccttgggaaaaggtgttttgtcttaagtgttttttattgatttatttctttctttctttctttctttctttctttctttctttctttctttctttctttctttcttccttccttccttccttcctttccttccttccttccttccttccttccttccttccttctttctttctttctttttttttttttttataatttggccagtttcttgtatcgattccagcagattgtcttcctttaatctatgtcacccactttgctctctgctccctagggaccctcctccctacaaccctactccatccttctctgccagtgacttacatccctcccaatgacctttcctccacaaaccctctttcctgctaactgggcccctacctatcaacccccccccaaccagactacttcctagactcataattgtttattttttttaaacaaaaacagaaaaatgtttactagatttttaagtttacatttggggttcttactcttcgtattggggttcttcgtgtgccctagaccgccttttttgctgtctggaaggtcacagtagaaatgtaatgaccgccccacgcctaccaaccagagtgcgtgtattgtagcgtgagtcacctagaggccaccgagtccatgcgactgaggcaagagcagatggagtccttgactttttttgttggtagggaacaaagtgtttcttgagtccacaggaccagccaggttcccttaggatctcacgaccgaatccttgtggattctagcagctggaaggatcctgtcaggagagagccgtggcatctgccacttgccatgtgctctgatagcaggaagaggagctgtctcttgagcatcgtgctgcattaaggcagtaaaatcccatgacccctgtgtatgtttttgaagctcagtttcaaacacctaagtggaggtttcaaaactcagtgtttgcattatggtgataataatccattgccctcccaagaaaacttggaaaataagaaaaaaaccatgacaacacaatattcctgggactgcacctgtaccccctaccgccacccccacccccgccccagcctccagccaccccaaaaaatacattggattttgtgccctggttgcaggcaagcttctcaagaaaccttgggcagtctccgtcacttcatttgtcccatcctctcagctgccaagttgtcacaatgtcaactgggcactgccatcggggaggagaggcatgtatcttgtagcagttggatgggacacctggcccccgtcacacttgcagttcagaaactcgtctgtggtcctcgtgtgaatcgggtgacgtttccatgtgggttagtccacacaggtgctgttgttactcgatggaccttgacagcatctgtcccgtataggaaagggggcgtcccatcatccagcggcatacattgtggtcaggccggaggggtcaagacttggtcagttacaataagtagcactgaggtgctgtggtatgctgagcgcaggaaaaggccgggcgagcccctgaacccgagatctcctgcgtagcctctgagcacattaagtatctgctgacgtccccaaggatgacatctgctgacttagagaagcacacagtaatggaatggaggagttaattcagaattcagcaaccccacacatggcgctgggaccagtgtggcagcagtctgtggccacacatggcgctgggaccagtgtggcagcagtctgtggctttgtttgaaagttttggatgcaatgcatctctttttttttttttttttaaagatttatttattatgtatgtagcattctgcctgcatgtatgcctgcacatctcagaagagggacccagatctcattacagttggttgtgagccaccatgcagttgctgggatttgaactcaggacctctggaagagcagccagtgctcttaacctctgagccacctctccagccctcggattttattttcttaaagaacattattttagggctagcaagatcgcttctacttaagaggactcggaaccaagacttgatgacccaggttcaatcctcagacttacatggtggtgggagagaactgaagtcctgcagggtgtcctttggctcccagcccccagcactaaatgaacaataccaactcatgtgatttcgctgaggacttgtccactggcatcttcctccctccctccctccttcctccctccctccctctcttatgtacctgtgtagagtgactaaggagtccggaatagggctgcggatcccctgaagctataggtgtggggttatgagccatcagaaatgggtgctgggcacccagctcaggtctttaggtgctcccagccctgagccgtccgtctcccctgcccctcctgacatcctgacagagctaaaggacatacatatacccagtgctttataagctgcttcctgtccaccgaaattacatagtcaaaagggggagggcaccctggagaattatgaccagccagttagtgtgatagctgctcatgtcagagaagaagggagacgtgtgcttttttaaagaagagatgtaggattacgttatagaaggctaactctgggctcttttggtgtctcctagggagctgaatatttgctcatttttaatccttgtgggaagtgattgatccccttaaaggtgtctaggacacataaattcacaccaacaatttattactggcttgctgtgttaatttctattatgaaagtagagatttctaaaattagatgcctttttttattctttttttttttcccgagacagggtcattctgtgtagccccagctgtcctagaattgctctgtagaccaggctgaccttgaactcacagagctccacctgcctctgcctcctgagcgctggttcgtggtgtttgccaccactgccttgatgcctttacatgttttttttttaaatgacaaaaaatagatgctcattttcaaaacattgggtaaggcaggaagtggcagaaaaacaaccatttcttccagaggaccatttatcctgctacataatttgttctttacacacacaaatcccacctccctccctccctccctctcccctacccctcagtacagaaacttttccggttcctggagttacatacactgatcctcatcgtggttgtaacccctgggtcttgaaagtgaccgactcccctctcctctttctctttgctgcctgacttctatgaagcctccatatgtgagctcaggggacaccctaggatctgtccttagttctgaacgcagttaatcacctaggaggagggaactgccttaatctatcctaacacaggcagactgcttgtgtttctgttttgtttctgttttgatttttttttttaaggactgtttaccagaaagcaagggctggagtccggtgttcccagctaggaggattgttgccagtgctgggtaattgcccagaaacctgaagaggctgtgcctgggatctgactgcctctgcaggtttaacccatgaggggtatgccacagagcaagggctcctctgcacggttggtcagtcggcagctctcctgagccctcctgagccctcccagccattttattctgaagtgcatgcaaaggttgggtttgcttccagggaagggagggaagggacagtggctccacccgactccagcagtaacgtgcacacagctcgtgcctggttttcggggatcatttatgctgcactctctttcccaggtgcttctgatttaccgtagctaatcagcgtcacggatacctgggcatagtggtaggagtggactgagctagcccaaccttcagctggagccactctgagggaatttggggatggaaaccaatctcttgtttgtttaggctttgtcgtcttctcagtaagctgaaagaaaacaatcctggctaagagtttggttgatggagggtttatatttgaagagattagattcctttgtcctttgcatgggtgggttcttgctctgctgtggcagatggctttacgtctgtgcacaccttatatctcaggagtgtgcgtgtgtgtgtgtgtgtgtgtgtgtgtgtgtgtgtgtaagccaaaggttaacattaggagtcatcttcagtcactctctcctctgtttgctgaggcaggccagctcactctatctggagcctgctgatttggctagtctggctaaccagcttgctgcagggacctccacacttactgcctaagcattgggatttcggggaaacagaccgccatgctatgtgaatagtagggatacagattctagtcctcactcatgcttttttttttttctttaagattttttttttaagattttatttattttatatatatgagtacagggtcactgtcctcagacacaccagaagagggcatcagatcccattacagatggctgtgagccaccatgtggtcgctgggaattgaactcgggagctctggaagagcagtcagtgctcttaactgctgagccacctctccatctctttttaaagaaattatgatttttttttttaatttgtggggagctggcctgtgccatggcgtgtgtgcgtctgtgtgtgtgtagatcacaacaaaaatcctgcacgtaagttctcccatgacatttgagtcctgaggagggaacctgggttggcttgcttggctgcaagcacctttgtccactgagccatcctgctggcccccaggtggctttgagagaagctcctttgtaacaaatcctgtagggacgccttcctgtcagcttcttttgttatgtgtggatagcttcttgccacgagttactggaagggtctgatctctggagttcaaaatgtcttttctcttagtggtcctgatgaaattgggcttaggataacctttgccaagggcactggaacaactttccagagtctcatagctgagcctgttgtgaagggcagtgtcactgattttcctgtcccctctccatcatcagactcctctattttattaccatacttgtttgggcttcatgcactgggtctgctgctcagcctctgagtgctgggctggcaggtgtgctccgtctgctctaatggggcaagtggacggacggacggacggacggacggacggggggtcggggaggcaccgtggagctgggtccccgctgcccttcctgtacctctagacacagccctgaccagctgcggatctgatgtcccaggggtacactactgtccatccaccaaggatgtctaaggaagttccaggcttaattggagtgtgtactaggactctcagtctgatgttaattaacccaaaatgagagagagagttggtaggcaccagtgaggactggggcacgtccctgaaaggcttcattagaaagcagctttacaaatgaactctgctcatctgctgtacccatgggccctgcgggctgcagagtaacctgaggtggcggtggggctgtgggggtgtggtggcttcgcctgacacttagatatttggcactgggtgacagggagtccctaaatttaaaacaagacagaacatacaaaccgagacggatgtgagggaggagagagttacagggagaccagtgtttttctatttttgatacctgcctgggagcagatgacaggtactccctctggtggacactccctccctccttccctcaggactggcaagccagtcttcccaggcagagaagacaccctggacctcacgaagctcccggctgtggcaccaagtatttctgaagtattctgactcagccacctcctgtttcttgtgactgagcttgctcttcagggaatgtcacatcccactttgccagtggcatgcttcctgtttcctttatgggcctcgctagttggcttgttcctgaatctagacacttaggattcattagtgaacaaacagaggagaggtgaaggatggggtagggtggggtggggatgtatacagtcaaagcatatcacttgcacgtgtgaagatgccatcataaagccccttaatttgtaataaggtattttgctaataaatagtgaaggaaatagcatctcacaaagttatagcatgctatcacaagcaagatactgacattactgggggatggggtggggaacagaggcctggagaggtatgtcttagatggttggaacaggataaagctggacacagtgacaagtgttgtgcacagcattctaagagccacttaatgatgcctgagataaggcacttaaactccgtcagccacatggcacggctccctccactttacaagcggtaaacttcccgttcttccagctaaccctgggtggagccgggatttgaacccagagagagatagttgactgcaggtttgtggtcataactacttagttgtagtggctttttgagagacactggtaagtgtgattatggaagtgattggtcctgggttcgctgtcttgcctataggaaatagtttgatccagtctggtctttccgaagctgtttagccagctttcctcacctcttttcattctccgtgagagccagtctaggatgctctggtgccctggcgtgcattctcagtaaagctgttctttccctcccttagctgagacgggagaagattgacctggaaaacacactggagcaagagcaggaggcgctggtgaatcggctgtggaagaggatggataagctggaagctgagaagaggtgtgtgtgtgtgtgtgtgtgtgtgtgtgtacacacgcgcgcacggaagactcctgtctgttaactagggatagctttggggcgtttgaatagcttgggtaacacataccatactaactattatttttatttaagtaattttatgtatatgagtacactgttgctgtcttcagacacaccagaagagggcagcagatcccattacggatggttgtgagccactgtgtggttgctgggaattgaacgtgggacctctggaagagatcagtcaaagttcctaacctctaagccatctctccagccccccatcctaacttgttaaaggaaaaagtctgttgatctttccggcagcagcttcctctctctgcctggcttttctcccccactcaagtacaaattgttttcatttgttagttcaaggccaagtcagagttaaccttggtaccgctgttcacctgttagctgttgctcatctctagggtttactgactcagttgggtgaatttaatagaaaagtgactgtttgcttttaatccgaccgtattttaaataaatacccacggattacaacacttgagtattctacaggcacagaagtaaagtgttactttatgttaagcagacattccttaagttacctccgtgcagacactcataggcctcgtttttatcacttggcactttgcagctggaaggtgggggaggcgcagagttcataagaacggcaggggagtcctgtctgggctttgtgtgcagtaaccacgagttccttttgaaggtggttgtcagttccctgccccagaatctcgtgtttgcctcccagcacccctgtgccgtacggctttggtttgcatatgcagttctacactgttcatgtgtagaattacaaacaccagacaaagcaaagatagctgatatatctaggagaaatcctcccgccatcgtctgtcagcttggataacaggactgaggtagcagttgtaataaattgattataaagttattctgtggccacaaccatagttacctgttaattgtctcaactagggtccagctacagttgtcgcaggtaacctacctttttggaatgcagttggatgctttatgtacatacagctttgttaagttaccgagcatagtcgtatgaaacggtcacttcataggtgaaaggctgttggtcctttcctaacgtttacccgaatgagaatcaggagggaacgtgggtgcaccagttactgaccaaataattctgactcggtttggttttctaacatttttatcattggcccagttttccaaaccttccgctcaggtttctaagtgtctataagtgacttcctcctccagggtggcccatagcacttccaaagcatcagagagagtagactttcttcctaccttccacgctctgcagcctgcttgctaaccacgttgtcagccaagcctgcgtgtctgctgggcgctgggcagggaaaccagatccgtgtttacatagacttcacagttacgactgactgccggggccgctcagagagcagggcaggaatgatgtacctgaggtcagatccccggcacccacctaaagctggacacgttagcctgtttctgcaatccctgtgcggtcctgaagcaagacagggggcagagagaggagaaaccccagaagctcaagccagttcgtcttgcttagcaagagaccaagagaacaagagaccttgtagcaaacgggaagggaggatccacacctgaggtcatcctctgacttccacatgcacctggtgcacacgaccacacaaagaacacaaaaggaatgagaccttgccactctgcctgggataatagtgagggccggcagagcggtcacgactagaggctccggtcagtcccatggacacttgtcaggcaagccctgagcttggatgttgtgtgttcttttactgcaaactgttcttcattattgtattccccccccctttttctgtgaagaatcctacaggagaaattagaccagcctgtgtctgccccaccatcgcctagagacatctccatggagatcgattcccccgagaacatgatgaggcatatcaggtttttaaagaacgaagtggagcgactgaagaagcagctacgagccgcccagttacaacgtacgtggtctcccaccccctccctgcaccagaccacgtcagtccctgggctttactgagggatttgcaatagtcatagtcatggtgtcactcgtgacgcagggacgttggcacgcgagttcctggtactctggggtatatttttagaacagaagcattgtggcaggagcggccgcaatttagaatgcgttctgaagataattttgataatctcaagtgggagtccctgaatgagcaggagcccaggtggccttatgccttctgttgctgaggtaaagtcctgttttaagggagagtgtgcttatttggcacgcgggttacaactcctcatagcagggaggtcacagaggcaggaagtcaagagaactggtcacatcacatctgcggttgagaacagaggacagttgataaatgtttacctgtgctcttggnnnnnnnnnnnnnnnnnnnnatatatatacgtacatatacatagttatatgtacacacatgtgtatatagcttattatcaaccatagtataatttatacattttatgaacttattaatatatcataaaatatattcagcatgatttacatatgtgaataattggtatatattaatacatacaaataaaatggatttcccaagagaatttcatataatgtattttgatgatattcactgttcagccttccccctaactcctcccacacccaccctccaccaccacagtctcatctttgattctgctttttacttggctccctgagctcagctatgctgtctctgtactcaagtgtgtggccctgttcactgcagcagagtaggtcggccgtggatggagccgctcacagtgagcgcatgcacgccttcccactgcagttaagataatctctcccctacactttgccctacaatttgccctttccatatgattctcttatccgacttcacgggtggggggtgggtttggtcacaacctgtagcccccaaatcaggcctggctgcctgtcctcggtggcagtaaaataggcaaattcatagtggaaggcagaaaaggaaggtttagtcagtggcgacactgggaagaggagagctgagagatccagcagcccctcgagtctggtttggagtcttgtgtagtagaaccatcttagtcttagctccgactagcttacagataagtattttatttggctttgacaattactgaggggggtcccctaatctacttttctatctgctggcctagctaccccctccctcagcagcataccccagatagttgctgtttctcctgaccatttgctcatggtctttctctctctcctccatggtctccttctgcccaccctcaaccagatcactcaaatcctgcctacctccagtagttggctccttatctaaccaatagttttaaggagcgaggtttgcacaaacaaaagcttataaacccgagaattcactcgtgggcctaggatcttcaggatttggcagtacaatccatagcgacagaccaaacctccacagtcctgaagtgagatagaagtctgtgtaaagggccaaggatttgcacatccaagcagttctgattagaggcgtggacccatgcccacccaccatggacccatcttcgtccaggtttcagtctcagcctgtgtattcgaaatctcttccatggagacaggtttccttctcccaggctgagatgcctggggaggtcacagctttgacagtgtccacttcttcagtagtctggtagagaataaaagattcgggctattttcatttctgcctgttacagttctacactgaatcataagtgacagttaaagctagtcatcgggccgggtggcctttgtgatggtgttaatctgtaggatgctaatgaatctacgcaggagcttcgctgcactctggcactgtgaagggagagccgtgaaggctgtttgccttcctggttgctgaatttaatctccggtgacatttgcacatggtatttgccgaacaggtgctattgaaatgcatacttaggattttggaaaaggccaaggtgttgtagaaatcaaggttctgggtttttgagcctgtctaggcttctctgcatttttaggggtctgccgtacttctgatgtttggctgcagacgtttcttccttgaggtaatactgtccggggaagatcttccctgtctctgttacttccaggtgagcagtctgcgcaggcgcacctcgtatgctctcagatgcgcgcacgcttacagaattgcttcatactgagagccacacagtaagcatgaccctttctgcgtctttctctttgaaaatgctgttaaaaacagcttgtcttgcagttggttgtttctccaagcttttgacacagctgccttgggacctccgtaaggaccgactattccatacatgaaatggtcttttcagaggattccttttcaaaacattcttactacatttattcatgtaccgcgtgtgcacgtggcctggtgctcacaagttggtcagagaacaacttaggaggggggaggggtaggttgtcttctctcaccgtgtagggtgaagagatccaggtcactctggcaggcttggtgtggtaggtgtgtcccatacctgaaggatcctttttgtctgatgatgtgccccagctactgtgctgtgcttgcacacgagtctctctatgcacaactgcctccttgggcagatcctgagcaggccagcccactcagtagatgtatactgatggtctcaggcctctaccttctgtctcccctgaaggtgcgttcagtagtagtagtagtagtagtggtaatggtagtggtagtggtagtggtagtggtagtggtagtagttctctcttggatggtaaatctcaatcctggaggccttcaaaagtatggtgtgttcttatttttactgtagcaagcataggcccagttgtgcaaatggacccaggtcagagcatcttgtgtgcagcattgggctccatctgtgcctctgctgtggctctcacatgtcctctctgctctgctctccctcacactctgactcacccttgtgtcttacacacaccctgataatccaggattctctcgccacacctggatccctggcataatcacacctgcaaaagcccttttgtctttgttcggttgggtctgtaggtagccctgtagctgcggcactgggtggttctctcagtcctttgaggactacactgaagtcctctgaaatgttcttttatttttttttagtccaagtaatctggaggtatgtctcagatgagcgcctctagatgctccacgaaaccagatgagctagctcagaatgttctggagtggtaggcagcttggtttgcacctcttcccaggccagccagcttccctttctccttcctcatttgtgcttggctgggaggcgctgagggaagggaaggacgctttatccccatcccttggcactcagggcctggtctttgaaaggcctgcagatctccctgaagacatctgtgaatgctagtgtgataccccccactccaccctacctcaggacaaaaaaagcctggttcaaagaagctgtcggcattggtcagctggttttcataaggcttaaagcagtggttctcaaccttcctaatgctgtgaccctttaatacacttcctcgtgctgtggtgaccacccccccaaccaataaattgtttttgttgctacttcataactataattttgctgctgttagggatcttcatgtaactatctgttttctgacggtcttcagcgaccctgtgaaaggcacattcaacccctcaaagtggtctctggcttaggaggccgtgttaatggtttatcccgtcttcccttggtctccaactctgcatcacgtggcttgctcctccttggttgtagctgtggcagttaagcccctcagccttcagccctgactggaacaagtctctagacttctcagtttgagttgagcctttcactctgccttggggctcagtccccatgtggtctgtacctgggaaggggacagggaacagcctgcttgtcactctgaagctgatttggtgccaccctcaccggatggcacctttgattacatttcaggaggtagcagactataagggtgatgagggtaatctctgagatccagagagctgtgtgagagaggaaggtcacagtgtaccagcagagggcgcccaagggaggccttgggtcctacacttgggtcctgacactgggggtgcactggggccctgctggcatatgagttaaattgctgaattgacaggaagccctgtagttctacctggtgtgacattcttatctcaaagttactgagtgtctcagcattcctctgctgagagtccccatatgctaacgacttaccctctccttgtattttttgttatggtgtgtatttttgtcgaggctgacttcaaattctcagcacccctgccttaacccacccccaggtgctgggaatatagacatgtatctcatgcccagcctgaatggcagtttcttctgaaaatacaatgcttcctcttaaatttctgttcttggagccttgggaatcttcggctctgggaacttttgctctgtcttcgccatctcgctctgagcagtagtcgtgatgcccagggccacccggtgctctctgttgagctcggttataaattgtgcacacaaacatgcttggggagactgattttaagctgttcatttgaaaatcaagcttggtaaataacccccacccccaatcacttcagtaaaaagactttgcatgtgggttaggcagcgggagtctccagactgcgttcagaacagctgagagatgtagtgtttagtctacgtagtcgggtctaataatccgagcattttaatttctgaaacagggttcaggttgaagagacggttcagtggttaagactactgttcaggaggggaatcttccattcctagccgctgtcgtctcagctcgaaggaacggaagtcctcttgcctccctgggcattgcacactagtgtcatggtcatcagaagtcactgggcaggcaggatggctcagtgagtaaaaaggcttgccgcaaagcccaaggacctgagtttgatccgtagacccatatgagtgaagtcgttcccagaggttgtatgcacacacacacacacacacacacacacgaggcttacatacactaggtgggaaaggggttttgttgactgtataaagttctcttttacaagactgttacctgtagctgaagctggcacacgactgagagttgctccactgagcatggaggatgcgctaatgagcgtggcaagtcccccaacccccatggtctgtttagattagacaggcagtctagagggaaaccagtgggccagtctatctccctaactgggctccctctctcccagcccccacagtggagaaggaagtctgacaaggcagccaatgaaactcaactccagctatgtcatgtatgcgcctggagcccctgtcctgtgaacgagagggaacagggtggaaacacctctcccagcaggccattagattgtttactaaattgtagttaatgtaacccctctgtaaaccttgaaacttaggcaaaattttaaaccctggtctcccgtggtaggccaaggccaccccagtgtggggtaatgattgcttggagcacggttttaatggcaagctctggctttccagactcggagaagatggcccagtacttggaggaggagcggcacatgagggaagagaacctgcggctacagcggaagctccagagggagatggagaggagggaagcgctgtgtcgccagctctcggagagcgagtccagcctggagatggatgatgagaggttggtacccgtgctctgccccagccccgcccccaccccccgcttcccacagacaccatctctatgactctagtcccaggaggtccagtgccctctttttgcttcgggccagacggccagcatgtttgtgtatacaggcatccttgcaggcgggacagccacacacataagttaaaatgtctatgttctagaaggggagagcttaactatctctgggaccgtggtgaagaacatcaagttagcgcacatgcccacggtagggtatgcgcaagattgaataccctgcttgcaccggaggggaagggctggcatttgttttgcttttaaatttttaacacagatgtttaaaggaatgtaagcagaaatactagagaaatatatttgctgctgcccctgtttctagtaatgggaggaaataaataagctcacatacttggatgcacacatcacaggcacatttagcaggatttttctcccaattgcaaacatttcagtgattttttcccccctttaaggtttttgttttgttttgttttgttttgtttttaatgttacctcatttgtcagtaaacttctccaagctttaacaaacaaattccttgataatttcaaacgtgaatatattgaatttaggtcattttcttatctatgactctcaactcgccctccttcttgccagctgtgcccccccccccactctgattctttgttttaaaccccactgagtttactatttagctcgtatgcatcgattttctttggaaattctcttctcttcacaatcctgatcagaaagactccaggctgtaggaattacagagcagtggctggggtttgctgttggggggggggggggnnnnnnnnnnnnnnnnnnnnccctgacatagtcctgggtctcatggaccatccctctgaagtgcattgtgtgcgtcgaccgaccgtgctcacctccatcccttcctttctccccttgcttccacctgatcggtcatctttccatccctcagcctcctctctgatttcatgctgagtgtgtgtgtgtaaatggctttacatatctgcaaaaaaaaaaatctagaatccacaaacgtgaggcgatgtggtatgggtctcttgagtctggctcagtttgctcacttgagtttccagcaaatagcatcgttcctgtcttgtcttcaactgtgtaagctccgccgcatttcccttgtggacagacctccctgcacaacccacagctcagctgtttagagtagacccttaacaacatagttgtacaggcatctgtaattatgtggcttaaagccctctggtgtcttacaactgagacttggcatatctgagtcatacgacgtttccagttttgtttttttctagaaacctccatactgatatcgatggcggccaggctggttctctttccacagcagcgtgagaaggcttctttttattcacacccccaccaatgtttgctccctgtttcttttataactgccattcagaccagaggggactctcagtataggtttgactggcatttccctgatacttaaggatgttgaacgtttttttttccgtaagtttattgacggtttactttcttttctttttttttctattaagttgttttagaataagtgctcactttgctgccctgcctgtcctggaactcacagagatccacctacctctctgcatcccaagtgcttgtgccccatatctgtcctgtttgccgttcatcttgtttgtccatttattgatggacttgtttggtattttagtactgactttttaaaaagcctactgccacctctgtttgggttcctatgagctttaagacccaaggaagggagccaggccacacatttctgctctgaccttctcggtgccctggctaaagctatgaggctacatgtatatatgggctttatatattctgcatctttttaaccacctgtccaatctgtagcccacaaagattctctgccattctgtgggcttcctcttcagcagtggttctcaacctgtgggtcatgaccgccatcaggctcacacatcagatcccccgcatatcagattcataatatggttcacattacgattcataatggcaaaagttacagttatgaaaaggcaacaaaataactttatggatgggaggtcagcacaacatgagaagctgtatttaaggtcatcaaattaggaaggttgggggccactggttttcagcatttactatttcctttgcttcttcgtttcatacagtgccatctgtcggttcttggtatgatttcccgagctattggagttatcttcagaaagcctttgcccctagcagcctcaagcttgcggggcctcacgtcagagtcttcgatcccttttgagatgatctctgtacaattttccattctgcctggggctcaggaccgtttgtcagggaggccatccattctcctcgtgcttttctccaacagtcggcgagctgtatggattaattccacatcccctattttatggctgtgctgtgctgtttttattactgtggctctggagtatagcttaaatcagacacccagacgctttgaaccctgttctttctgctcaggattgctttggctgtctggagttgtttgtgtctcggtatcaattttaggatttttttttccccctcctatgtctgtgaagattgcccttggaactgtgatctggattgcagttgttgttgtaatgctggttatccatgctgatgggagctttttccatctcaaggtctttttcaattttcccctgccttggcgtttttaagtttatcgttgttaaggtctcttacttactgagttagttagaatttactccatgatttatttcttgccaaggtcagtgtttggtatatagaaaatctgacgttttagatgttgagtttgcacctcgttactgatctgatttaagagtcttcgggatcctttctaatgtaataagccatgtgtgcaaatgagagtcatccaatatcttcctcacttgtagccactgtatttctttcgtctgcttgctcctggcaaagacttcccagacatcctgagtaagtgcggggaagatgggtatcgctgtcacatgccggctgtgggggccgatgcttcaagacttgccccttcagtttgctgtacatgctgtttattataatgaggtatactcttccacagtcccttcagggcttttagcatgaaaggatgctggactccgttaaattccctctgtatctgtggaaatgcagatgcaagagtctgccgatatgaatttgttggcaggagtgtctcgaaccatccctgcatccctagaatgaaactgactagctcagagcaaacagtcttttttatgtttagttgattccaattgcaagttcatttagtgagagtttctgtatcgtgtctagccgagagatggtcctctaattgcctgttgttgtggggtccctatctattggtatcgggaatggtggctgtgttaaatgaatgtggccgttttcttcttcctattgcatgctagagtttgaagaagtttggtgtcacctctctttggaggtctgacagaacttcagcagttagtccctctgggcnnnnnnnnnnnnnnnnnnnntcagcagttagtccctctgggcctagaacggtgtctgtctgtctctgtctgtctttctgtctgtctgtctctctctctctctgtctctctgtgtgtgtgtgtgtgtgtgtacagtttgtattactaagtcaaactcattgcttataatgaactctcagttctaagctgcttctatcttctcactttaattttgatgagtcttgtgtgtttcaaaagctgtatccatttcttgtagattgttccaatttttttagaatgtaggttttcacactatgccctgatgagcctttgaatttggttggtctctgtctcaaggttagttgggctaaggctacgtcaaagttaacttttcaaagagccagcttcgctattgcttattattattaataataatactatgggttattactattgatgattatttccatctcattagaactttgtcctgatcttaatatttctatctattgatttttggatttgacatgtatcctttttttctcaacccttggcacttcacaggtccctgtttgttcccttgcttgttgtcctgcatagatcacccttcaccctagcctcagtgttattccgctgctctgtgttttcggggtcttcactgtaagacgtttagggttcttctatcttgcctctttctatccacgcggccattttcttcctccgactctgggaaactttgcgcattgtttttactaaatgggttttctgtgtctttagcttgcacttctctgtctcctatgctggaatgagcgtcctgctggtaactagagcagctgctctctgcatgggtacctctgtcagatccggccctcttgtctcctcctcagcacttggtattgaggaagtcgttaagataactaacaaatccaaatacaacaaagagctttttgagcaccagctaaggaattagccttcttctgacacagaccatttctgaccaggtgtggccatatttcactgaaagggagttagagcctcttaagatgtctgggcacccactgtgtgggcacccactgtgtgagacctaggtcaccagctgggtgtcttagggttttactgcaatgaacaccacgaccaaggcaactcttaacataggacaacatttaattggggctgggtaacaggttcagaggttcagtccattatcatcaaggtgagaccatggtaacatccaggggctacaggagcttaagatttctacctcctgttcctgaggcatttaggagaagactggcttccaggaagctgggaggagggtctcagagcacaccctcacagtgacacacttccttcaaaaaggccacacctaatagcacctctccctggaccaagcatattcaaaccaccgcatggggtctggtctgtgaggataaagtgtgactagccacacagccctctgcctctgtccaccagagaaataatagatccagagacatagatccagagaaataatagatccagagacatagatctagagaaataatagatccagagacatagttccagagaaataatagatccagagacatagatctagagaaataatagatccagagacatagatctagagaaataatagatccagagacatagttccagagaaataatagatccagagacatagatctagagaaataatagatccagagacatagatctagagaaataatagatccagagacatagatccagagaaataatagatccagagacatagatccagagaaataatagatccagagacatagatccagaggactgcaaagctccccaccacttctgtggatgctttcaagaaaaccggatttttaaaataatggcaagttataaacgggactctagaagttacagaagaatgacaagcttccctctttaaaatctctctgcttcctcacttgaaaaggttttactgtattttgaaattgtaatccctgcttctaagtctgttcttgacagtttcccattctcagtaaaacggtttgactgaacacgtcagcccaaacacaaagcagttcactagatattttactaactactttaagactcgggggagctggagtacagagcacctagggctgggcttcagaggggccgctcttagaagatgtggcttccagatagatgggccacttcctccagagctgacgttcacggcgcaagtttgctttatttctgttgggtttgttgttgtgtttgtgggttttgggggggtggtgtgtcctgtagtcctgagctaaccttgcgttttgatcctcctgcttctgccccagattgctgggattagaggcgtgtgccaccagagtgctagaggcacaacccagggcttcatgcatgctgctgcaaaaactctccccaactgagctacatccccagccctgcttttacttatttttgtaagttattcaaggtaccatggagttgctaagtacctggttaagtagcactctgcaccccagaattgagccattgagatagatctaggggaaagaaaataccagacacttaagactgtaaggggtgatcttaaaccaccttcctgtttgtataatataaggaaacgccccacctggtgttcttatggtggactgtcctaaagaagggaaggagacagagacaggcgtctagttgagctgtgtgtcattcaagcttcattaacctgcttggaaggggctgggtcagtccctcgtgtgaataaacaccagggctaatggtgctctgaggtccaagtccatgcctggttagccttaagaccagggaggatggtttgtcaggaagtctgtcaaacagaaatccccctgcatcagcactgtatgcttggtttgcaaagtgaaagccgacggtccccgtaatcacacgtcagcatctttgggcccaatgtgagctagactcagcacagagtggctgggcatgacccgcccagggtgcccagcactggtgtcttctgttaaattctaacctgttaagcagagcctgccttgtgaaaaccttggcactcggcctaggggcatatttgtccttcagtgtgttaagtatcagtgagcctgttgattttgagtttcaagtaacaattcaaatagatatatctgtgtgcttgtgaggtcactggcaggactccaggacaggtcccttgtgatatttatgtgttgcgtggctacgacaagtctctggggatgatgacacttgtgagactagagcagtgtgactccggagtcctctgtactagagatgtcccctgggtacagcctctccagctcccaggattttgaccttaggttgtgccttgagagcttcactcctagggtttcttctgctgaggcccacgtgaacatgggtgtttgaaccacttcctcctctctcctttcaggtattttaatgagatgtctgcacaaggattgagacctcgcactgtgtccagcccaatcccttacacgccttctcccagctcaagcagacctatatcacccggtgagtgtgtctgcgggctacctcggtgtggctgttttccagctgtttagtgcgcatgtgtatgtgtgtgactgtggctgtgtgtgtgtgtggtggttgtgtatatgtagctgtgtgtatatgtatatggggggctgtaggggggttgcaaaggggctgtgcatgtggctgtggggggctgaggctgtttggggggctgtgtgtatggctagggctgtggcaggggctgtgtgtatgtgttagggctgtttggggggctgggagggttgtatgtgtgtatatgactgaatgtgtgcctgtgtggcactgggaattggacccaggccctcacacagatttagctagatgctcaccgatggtttttagctagctcttgtggttgtattcccttctattttgtgatttttaaatctaagtcaccattagtactgagtatttattggttggagaccttaaacaacaaagtcccttgatttactttcttaattatttattatttagtgtttttctttactttttaacttttatctttgaggatttcatattatctgtctgccccgtcttcctcagtgttcactgagccttaggtacagatgatgatgatgatggtggtggtgatggacgaccttcaatttgacttcaaaacctctttctagaagactgtgtgtgtgactagtcttaggggatgggcagggttcctgggttgattgcaggatgtcttcccatgtgtcttttatgggttccttcacttcattccaactgccttaatctcacttttgctgtcggtagtaatctgggcatcgttttcttcccttgtgaaaatagaagcgcagccagtcacgggttactagctctgggtctttgggcgaagaggaggccaagttgagcgtctttatccaaaaaccagtgtctcccactccccctcacccccccacccccagcacaagctgcctcctgatccttgcagtggtttgtgagccaagcctcgctggcctggtaggttgcttatgcaagcaagacagctagcgtctcccactgctggctttgttagcacgggccttgcctttcccagcatgcttgccttcatctgaccccaaatactcctgagtgtcccaggctgggcaccagcagggcttggggctcccgtgtaggggggcgggtatgtggtccaccctgagggggaagaggaagtagggaggaggcgtgaggcaggagtggggggttggggggagagaaggctcatgtctggaggcttttgtttctgtgcctgtggataaacaagctgcagatagacttgagggacaagcggggtgccaggttggcaagtgtcactgtaggggtggccttgcaaaggctttcttaggactgtggttccttttgtctgaggccatacttaattaagacaaggatttcccttaaggttcatgaaggggacatgatgttctagaagcagtacaattaggacagtgtggtagaaatgacttggctttattagtttggaatctagccagcactaccgtgacatctattgttcttgctgctgctgttgttgttgttgtgtggataggtggtttctttgtgtcttcgagccatttgagtgcaggttctcggttcagcagggagcagtgggtcccctgagactggagttaggatgttgtgctgccatgctctgagtactgggattagcatcaggtcttccgagaacagagtagccagggctctaaccattgagccaccgctgaagcctgccgcgtcctctgaggagacactcagagccaacagtaaagagtctcccacgtggtgacagctcttctgttggaactgtgagctctctaaggcaaaggagaccaaggacagacactggattcctacccaagccattgttccttgctcttgccaaaaggatattcccagatctgaactcatttctctagtctccagtggcctcagtctcatctcaaaaacttctcatagctgctcctccatattccccaggacagtgctagggcgatagaggtttcattttactgtctgacttgctggtgcaagaggaaggcttgagtcaggagtaaggagggtccgaatgccacctcatgctgggtggaatttaataccttatgtaatctgtttaaaggtaacaaaatttctacaggaatgtctttttcaagtgatcagaagaaatactgcagtctggggtggggtttcagaatgctaaagatctgacagagtcaggagccttgggtaccaaagctcagtgtgaccgataaaagccatctaattttctgcattgtgatgtttctgtcacagtattgcctaatggtgttgttccctagcagtttggggacactgttacgtcacattgaaattcctgatggacacatttctgaaatagatgtccctgtccgtaagccgctctgaatgtgtactgtacgcagatttccaagtccaaggaagttcactctgtgtgtgtgtgtgtgtgtgtgtgtgtatacacacatgtgtgtgtgtatgtgtgtgtgtattttcatattcctgggctaaagggtgaggtgcatggtaatttaagatttaaggaagaataaaaattaataagaccaccaagattatagaagattatagtcaatagggcctgaggaagggggttaagaaaaaaaccactaataactcatgtaggcttgcagtcatcttctgaggatgctacagcggttatgtttactaatggtgggctctgtaacacagtgagattgaataatttctcccgtggctcagaatctgctgctgagcaccgttcccggattgattggctttagggtcaggcctggggttagagttagggtcatagggtttgatgttcaccgttgagaattgctggcctagagcagcagaagttggggaggggcagcaatagagagtctgaagagtcttggtagctaacatgatctaaaaaaaaaatttttttttttttaaattagcctagttaataggctggagttttttgtttcatgaaaggaacttcttttttttaattattattttatatttttaatgtgtgtgaatgaatactttgcatgcacgtatgtatgtctgtgtgtcacatgtatacctgattcgttcagaggacagaaagaggtacttaggtcccctggaactagactatacacccctgtgtgagcgctgggtctcagtcctacatgagcaatgaatgctctgctgagcctctctccagccccaaaagccatctcttgaaccctctttaaagctaaggcatcgttttcttacaaatgcatcttgggttttcaggagtgagatgtgtgtgcgatttttcgttttgcttttgcttggtggtggggttcaaagccagaccttgtgcaggtcagtagacaacccttccacccccactacccccagccttaacctcactttcctcacaagtaggcagggaccctgctcctggactgttatttaaagacaagctctccaatctcagctaatcaataaacagcacgttaaatcaccaccttggtattagagactatcagagccccgctttataaactcaagtcaaaaaaaaatcaattgggaatgagaaatgtatcacacataaagcgccactgacgtaatcaagtcgggagataagtcctcagcatttgctgagaggccacaggaaagtcctctaaggaggtacttactcggtatatctttatggaaacggacagcaaagcttccgtacaattcgaggcaacaataaatggtcagtacggcttggccacttgccacctgcaggtccttaaaagaagatgactctggtccctttccaaccaagcctttttctattagttttcacttcagccacttttatagcgctgtattagttaatactgtgaccaaactcctgaccggaagcaatctaagggaagggcagagagtggcctacagcttgtcttgtacgggtgacaggagcgggggacctaaggcagctgctcacattaaagtgaggcccaactgtgaaacctctatcacttctgagacccaccctaccccttaagggttccacagctttcccaaacagcaccatctgctggagactgagattcaagcacccgaacctgtggtcacggtggagggtgcacttgcacacggaagcatggccagagcctacctgtccttgcggttttttcagttagatgctaggaggccaagacgtaaggcgctgggttcatgcactgtaagtgttgcccagaccagtgcagccttcacttctgagtatttcaagtatgggtcgttggactctaccctgggcctgtgatgtgtgtgcatggctctgtgtgtgtgtgtgtgtgtgtgtgtgtgtgtgtgtgtgtgtgtgtgtgtgtagaggtgtacatgtgtgggcgggtacacatgtacttggaagctagaagactgcctcaagcattcctcaggagtgagccatccaacttgtgttttgaaacagtgtctcccgttggcctgcaatttgccaatccagctaggcttgctgactagcaagtcccagggatcgttcctggcacggtcaatggttgatgggctaaagctcacgtcctcctcgtgcacgtgcaggaagaacttcactgactgataggtgctgctgcaaggcaccatgggaatgaggctggcttcctacaggaaacctgccaaacatgacagtgggcagagggttgactgcccttaactcttggctcctttcagagaaccttggcctgtgtggggcttttgtatcctatattggattaggttacaaagtttgcatgcacacacatacttacaacataaggtacatgcatgtgcacacatggacacaggtatacatacagacacatatgcacgtacagacacagatgtgcatacagacacaggtgcatacagacatatgcatgcacgaacacacagacacgtgtgtacacacacagcagttaacgtcgtttacacactgcaggttttacccactgtcgagcacaaatattcttttcagccctatagtccatttgacgcttgtgtctggtgtcacataaaagggtttggttggtttgtttttgcgtgtggatttgcagttttccaaacaccattgaagagagaccattcttgtctctcctcatctctcatcagcagtgttgaagggttttccgatgaaatatgaccaggttcacatcctagcttcctgttttgctttgctttttagctgtcctcggctcccccagtgcatgatggatatttttatgcccctcgatacccaacatgccactgagtggccccacccctctcctctgcttgactgtttttattttggcgcacctgagaccctctgcctttgggatttcttccctagatggctgaagatctcagacagtcaggctacaaacagtactgaacattgctgcccttctgtttcaggtctttcgtatgcaagtcacacggttggcttcacaccgccaacgtcgttgactagagctggaatgtcctactacaactctccgggcctccacgtgcagcacatgggggcctcccacggcatcacagtaagtgttcttgtccggagcgggcagcacctcacctctgacccggtctctcgggggagctgaggactgctgctgtagccacctcatgtcttgggtcccctctccttctagctatggagtgttcccacgcgtttaacgtgaagttctggtgttgaatgtcccgggatctcgagactcgggttcgcttacagaaattacccactaggaaatataatttggagtggggcgaccaccggagtgagcgtggccgaccggagcgagcagaggtcctaaaaattcaattcccaacaaccacatgaaggcttacaaccatctgtacagctacagtgtactcacatacataaaataaataagtctttaaaaaaaaaaaaaggaaatgtaatttgaagtctggatggtgtcttcattgagctgtggccagctatttgccattaagcattatcagggatttccatagcatctgaaaattgcctttgcagctgttttccttggtaaacttcctgagagtaaccttggcttctatttccatccctgatttcctctcctgaatccaggagggccaagtacatccagctctcaaggtctcctcagggaggctggagagatggctcagcggttgagtactgtgccatcctctaggaaacccgggctcaattcccaacacctacatgacggctcataactgcatgtaactccagttccagggcatccaacccatcaggcatgcacagggtacatacaattatctgtgccaggccaaatatccatacacacaaatacatcgaagtcccctcagaagagttgccctgcacacatgaccatgcggttggctgagagaacaggaagacgtgcaagagtaggaataaggagggagaatggttcacagaagagccttgctccatgacgttcctcggggtgcccatgtaagtcttgaagttcaaaggacctggtgtccaggtagaaaacgtcatatcatgtttcctcagaatgaagggcaagctgaatgatggaagagattggggacacactggtagggataatgtgacatcactatcatcatcattggctgtgaaggatgcattttcattttgtgttccgtcctcacaggcttgggtgtgaacacaacctcctttcccctgctagttcaggaaccaccgatgacagagaaggagcccatggctctctttcccgactcggggtgggttccgccctctgattcatgccttgtcagaactgaccccgtgtccccatcttccccgcagaggccatcgccacggagaagcagcagccctgacaagtttaaacggcccacgccgcctccgtctcccaacacacagagcccggtccaaccgcctccgccgccgccaccacctcccatgcagcccgcggtcccctcggcagcccccacgcaacccgcccccacgcagcctcagcatccggtgcacccctcctcccagccttaatgcatgagcttagtcagaatctccagttgggactcgtctgatggagccaccttctcaacgccaaaggcttctcctctcccggcgtacttggatctgacgcgtttgcattgaggttacctatctacctttccctcctcgtcgtgtcgtgaatgttcgtcggaaacgcagccgaggttgcgggtccgcaacactaaccagacgactttctccaccagtgttttacttgaatctccgcgtctgtcattccctggctggaacgtcgctgtctggtatctggtaatgagcagcggtgtgcaaaccctaccccaccccctccaacccttcccccccaggggggccccagggctgctttttttcttggcttttaggtttgtaaaataagaagggagatcttttttataacacttctctgtggatttgcaggaaaattaccgagctgtttagaaaccttccttctccaggtcagtgacgtttaccgaacataaccaagaattcagcactacagttcagaccttttgcagacctaactcactgtaggattggaagttagatgaaccagtgcccacaacatgtagtctagagctttctacagacacacctttttacagattgttttctgatgtaaattgaccaccatgtcctttgtaaaacagcctatagaaacaaatcacacagccgtatctcccccacgtgcgtgggacgggaactattgcctattaagatgtgatttttattttcctttctcaatgttaatccacctaagccggcgccctctagcgtgagaggagagacgctttcccaccaagggtctcgatggctgactggaatgtaggcttagatccctgctgcgggtgggccgtgagattgtaacagccaatgcggctaaacccatccattcttttgtgttgtcctgagacagagggtgcaaacaggtactttccaggtgcaaaatgctgttaggaaataatgtctgaggggtaggcgacagacaccctagcatgatggcgcttggcagatcatagcatagcaagcagtgctctctggccttgacgggcgctcacttagccaggagagcaccaagaaggttctgaactcaatccgccattccttcagcacaaatccttctgtttggccgggggtgggtgtgggtggggacaccaagtggctcttttgtagaccttcgtctctgtctgtccgaggttactttgtgctttagtagtcaagtgcttcccctgcccgtgtttgcatatttatatatgccgtggatggaaataacttactagagaatgtatattttatgatgagaagcgtgactctgttagctgtaatcagagaactgaaaaattaatttatcagtaatttttaagagttcatgtttgtgacaaaccatctcttaacagcacgtcctcatggaacacactcccgaggacaaggaacataccttggtgatattgtagataattaatattgtacagtctagaaacctccattttttgccttcgaatgcatatttaagagttaacagaatggaaaagtgttatcagataatagtgtttgacagcgttttaagaacttgagagtaagaacaaccataggacctttcactcttctttctcgtccacccctaaactgagaatgctgtatctccagcgaccgggaagaaactgtcagcctataaaagttttattttcaaggtgtgtgatgtataggccatagtgtggttagcagacatgggatggagtctgatatctcctgtcaaggcattaggttttttcagtgtctgactaaaccccgggcattttccaccagctccccaaccctcttggtacatgaccattccagggaaattctgaggatagacagaggaattcttccttcatggtacagtcttgattttttttttttttttttttttgtcctttcgagagaagtacggtatgtgtttacaaaatcttttctgggattgtagatttcagtactgctggctagcagctttatcctccagcacacaggtccgttctggaaagttcttccctccactgtctttatcagttaagttacctcctagaagcacaagtgtaaaagcaccggcgtatggcgagcggagcctttgagacgtaggttcttgacattgatgcataaagtgtacctgggattcctgtagacccatcagttcacctcaaacccagctcttcccacaagcgctttgcagtccgagtcagtccccggtccctgcaggggttaagaaccaagagaacaaacactagaggatctgaatgtagggtgtattgtgtcacttttgaagcacatagtgataggtaagagaaccagatgttgagcccctagggacggtagccccttgactgtgggctgggcgtggcttctacaggttcagtcagtagccaccctcagcagttgagagcaacagtaccttcagtggcttcatttcctgtcttgttgacagagaccctcgggtaccactgtgctgctaatagggccagggctctgctccccgacgaccttgcctttgtacagaaccaagtccacgcacccagcaccccaccagcacctctgggctctaaactgctttctctcatcaagcatgctggcattcaagacagatttctcgacctttggcagacatggaagtgttttaagattttatttaaatgtctttgttgacccagaaggacttttagattctgagatcctaaggacccccccgccccccatgaccatggggtgaccggaatgtggctttgatggctcaggctgctgtgccttttatcattggcttctgattcaaaccagaaataattgataatgtgaatttgtgttgatccttcagttgtaggaaaactgtatatctatcccccgttgttaagtagacatgagcctgtcccctgcttgtagagattgaccaggaaaacgggaggaagcatggccgttgcgtgtttcagaaagtttattgtttaaaatacagaaggaagttttctttgtgacttgatcttctgtctagtacttgtctaatcagttaacccacgctgagagcttgtagcgatgcctaccaaagacatgcatagtaaacctcctgtttccaaattattaaagagccagccattgatgctgctcctggttctttctgggagccattgtgagagactaaaagattcttagggtgtttgtttgtttgtttgttcgttcgtttgtttaagttttaatttctctctttctaaatttttgattacaaatgtgttagcctaatgtgttggggagcatttcccagaatgctcagcagttgtgattactggtcacacccaggtcacctcttctggagtgatcaacgggatcctctgtgcgtgctagcatgggtgctgtgtgtgtgcacgtgtgcgtgtgtgcattcatgccttaacttgggttactgctcagctttgccgtctgacttggtcctcaccagcatcagattgtattgtgcatcctgatctgaacttcattctggtaaaaaaaaacaacaacaacaacaaaaccacaaggttgcaggtagcacaggctggaacgcattcctttggaagaacgtctgctcagatggaccctgagatgtctccacggactttatttgggactttgtttggaaagaaagccgactgtaacttgggcagatgtcgacaaggaagaggggagagccagatgccaccatgccctctgcctctgcatatccgtgtgctctgtgtgttgtgtaggctcatctacagcttacctggcttggagttcaggtaatggtggccatcctgacattctctgttggagtttagagagatgtaagacgtccagttaatgtcttatttactttatgttgatcagtctttaatacatgtgctgaatcagaaaaacctaaataaagataattttttaaaatgtactcctggaactgtcaaatttgtttcgtcctttctgttctttgagttgggaatgatggttggttagtgttggcaccaacagacaaaaccagattctattacaaactcttaacggcatccggaggaagtacttgtaggtagcatcagtagggccagtgtgggtttctattttttcctttttctaatttttttaaaatatacttaggagaaaaaagctacacgtatggatgttttttgcctgcatgtatgtctatgcaccacacgtgcatgcggtagccagaagagggcattgggtctctcacacctgcaattacacgtggttgtgagttatcatgtggatgctgggaattgaacccgggtccactggctacccaccctgatgttgaacttgtaattgaactgtgttttcaaattcaaacagttaaacccaaggggttataaaatggaagctacactcccaaaatgtctcacgtggaccaatatgcactggcacatgccataggacatttcagggatgatgatgagtcccagaggattacagtgaccttggcagcaaggctgtcatgaaatgctgtagttggtcatgtacgtagcctggtatggatcagtctttgacatcaaccttgtgtaaacatcactcatcatttgtacgtagtaattggtaaattttaaaatgtattcctacttattgaaaagtttacccttgggctagtaaaatttcccagagagtaaatgtgtctgctgcaggcctgacaacctgagtttgaacccttggacttgtgataggagagagccaactcctgcaggcgtcctctgacctccgcagcccttcagtacatacatacacaaaatcaataaaaggtaatgcaattattcacttaagacagcttgcatcgcagcagcggctaccttgatacaactcatgtctgcattgcttcagtaggtcaggaaaataatatgtgggatgatctgtgtagggatatttggggtcagtgtccatgtgttgggtgtgtggcgttttggtaaggctgcggttggcaggacacaggagtggaatcctttaaggaatatggtcttcaggaattcctgataaccatttcagtgagtcaagtcgtttaaatccaccctgcccccccccccatttttttaaatgcgagaatttgccttgggtcagagaagacttctaaaggaattgacctttaggcagggttcagaacaggtggttggagtctccgtcccaatttcacgagttggatgggggaggggctccaaggagtggtcagtggcagaaaggaagtctgcccagggcaagcgagttggctgcttatgtggtgtgtacccagtgggaattcccaagggagactttagtcaagcttcaggattgccctacctgccgacgacgctgcagagccacctggtcctttgacccgttggagaaaggtgaccctggacagaaggtttcttcatccacatccaggttctctgtgtttccagagtcctgtgaggtggcaatgcttcgtgagggattccggcgaatgacaccataaaaagtcagatagttggggtgtcgggtagccatcaatcatcccctgacttggcctggagcattgatggagaattagaaggcatttttcttctttttttcttcctttttttttttttttttttttttttaaagagacgggtctcgctatgttgtcccccagaggctggattgcagggactattcacaggcacgatcccactactgatcagtacaggagttttgacccgctctgtttcctacctgggccggttctttctctctctctttctctctctctctctctctctctctctctctctctctctctctctctctctcacacacacacacacacacacacacacacgccttagaccacctggtggtctcccgctcccaggacgtcgccatattgatgctaaacttagttcggacacccaatctgcatagcgcactactgcccagaacttcaggacttgagatcctcttgtctcagcctctcaagtagctgggattacaggcgtgcgccaccacgccctgctgcattttttaattcaaataataagacaaaccaaaacaaaaaaagactcctggtctctttagaaagagttacacactggaaggctgtgcggtcatccccgactttgtgcccgatcctcttccgagcccctctgttcagcactgtagtcgctaaagcacagacctgcaggcttctgagtttgtgagctatttggagagggcatgtgataaataccggaagcccagcacagctagttcttgtgtttgctcacagaaaacaggaacagaagttcaaagtctggcttggagagaggcatataccagaagttcccgtactggtacagataataagaaaaatgtaccctggggaccttgataaatgaacctcaagttacaaagtaggaccagtgttcctgggttctgttagctgttctatgggctgcagccccttcagaggtcagcaaccctttcataggggttgcctaaaaccatcagaaagtacaggtcaccacatcatgaactgaatttaagtgttttagcactagcaaggttgaaaaccactggtctaatgtgttccatgtgtctacaagatggggtctcttggtttagaaggctgaacggagacgagtccagctctatagaaatcctaactccagcttgtttaaaagtcctggttctccagagtttcctggtgcacacctttaatcccagcactagagggaggcagtgacaaaaggatcatctgtgagttccaggccagccagggctgtgcagggagacaccccacccccacccccatctccgtgttacctctgtaagaacagccctgatttgtatggcctgccagtttcttctgtgtaattcaggagagacttcaagctgcacgttccatcgttttatttaccgtgtggctgcctacgctatcaatatcctggtgaacaggagaagagacagacgctggggacgtagtttaggggtagagcacttatctagcgtgcccacagccttgggttctccccacacccccaaaccagaagtggtggtgcttgcctgcagttccagcactagaaggtgagacgggcaagaaggtcagtacttggtgtatgaaaggccagcctggaatagaggagacgccgtctcaaagaaaataaaagaataaattttttaaaaagtgttgtgtttgaggatcatcttcattttgtatgtgatttttgtcctttaatttttaaagatttatttattttatgtatatgagtacactgtagctctacagatggttatgaaccatcatgtggttgctgggaattgaattcaggacctctgctcactccggtcaaccccacttgctcaggtctaaagatttattaattattacatctaagtacgctcactgtagctgtcttcagacacacactagaagagggcatcagatcctattatagatagccatgagccaccatgtggttgctgggatttgaactcaggacctttggaagagcactcactgctcttaaccgctgagccatctctccagccccatataatttcgtttttaagtgtctgtgttctacaaccagatcactgtgttcctggatgtcagctgttggctctcatgagctttgcccagaacatctggcctgaggtcagtagaggctccactgtccagcaagcatgtccgtctcttggcccaccgtccacatgtgaccgcaggagcctgagaaaggccctgagtgcagcccaatagaaaaaatcttaaaacttctttgagcttgatgtttttgcatctgggggagtggctggttggtttgtgtcttcaccgtgctgttctcaagcataaacttcacagatgaccgagggacaccgtggtgttacgaagtctggacatgcagtaacccttggtgcttggtgattctctctggacactgccaggtggaggcagtggtttatgtgggaagctcacatcacccaagcacagctccgggccaggagcaagccagaaatgaaagtgacaggcgacacacagcaaactggcactcccttgggagtctcaggaccctgtgggaaatgtctctctcaggtacagttccagaaacatgtgatcttagccatttcatgagcaaaataaaccccacaagaaaacaagtctgggtgagatgcagggtgaggggtcggccctctgatgttgtggctctgaggtacacttggtgtcctgctggctgcatcagatacttgtagtatcttccaccttcttgctagcaaccctagggcagtacatcaaatgtttgctaactggtcacattatgtcagcagcatgttcctttaaatcaaccctatccccttgtgtgcagaggcccaggaacaaccttggatgttaatcctccccttccatcttgtttgaaacaaggtcttattgatttcccctccactctgtatcctagctagttttcttgggagcgctcacggatctcttccctgccttgcatctttacagtggaatattggagtcacacagacagacacactgttctgtgtttggggactccaagctcagttccttaatactcaaaacaggaagcactgtccccaatggactacttcccccagctcatggcaggacatctctgacaccctgagccccctgttctgtgtggatcaagtgacctttcattttggtccttgaacccaatggcttagctaactgaaagccagagaactctgagatacagaagacaccccctctgacactccccccccccccagtctctgccattctcaatgtccacaggggcagactgtgttgggctttggttttcacgcctgacacatcagagggaagatttctttgggttctcaaagtacccagccgaattcttgggtcacattctctgcctcaccatctgaagaaaagtccttggttttccttgcttttagaaccttgctccacccagcacctcagtactgttttaaaggaagggcaagtcaaacagcccaagccggaaggagcagatgcgcctgtccaacagttaagtaaacatggtttttatgctagactgtgtgtgcttcaggaaaaataacggttgttttaatcggcaataaggtcctctgtgggcaaacaggtttcactgccattcagagagagcaaaggctattcatttatattatcaggccactttctacagagagccacctcccctgctccttctgagactagagcaggggaggggggtcccaggcttgacctggaatgtgtatgagcctgggccctgagttacattttgtctgtttttggagaatccatggatttctcatcaagcttggactggcctagttgtgtgtctaaaggcaagtgccttccattcagtctgggcactgagtcaggtttttgagactttgatttcagcaggaactggtatatcctcagtaatcttttcaagaaacaccgaatacacagctcgtttggctccctgcctccctgcctcccctttcccccttctatcttatcaagatgtatgcttttgccacaggcacacctgtgtattctgagagcccaggcttcagaacgtggccttgtgaccagaaggtctgctaccagagctgataggttatttctctgccggtgaagtaagccaattcaagccagattagattatattaaaggcaagtttattgggcaactgttcttgaacgccctttctggcctcaaggactgaggccaacggagtcgccatggggacagggaatagaggagagaaagaaaggggttgaagagaagaggagagaggaggaggaaaagatcagaatgtctggattatacagggaggagcctctagggggaagggtagcccagccccatggttggaaagttcagggttgggagcagggaataccaggtagggagtgagggatgctgggagaatctacaggccagatctgctttagtatgttaagaagaatgcacctcagtcccttgtcctggtccaaaaccaaaggcgcacgtgacctctaacactgatccttgatactcatctttggatgagtaatgtagccaccctgaatctttttttgtcttctcctccaggctgcgcaaggatatgtgcgtcacccccaagtaacactctgccagactggagctgaggactgtgtgtgtatgtgtgtgtgtgt

SEQ ID NO: 1046 - DNA, 1713 bp, Mus musculus
ctccgccgccgccgcccgcgtctgcgccctgccgcccgcccgcgccgcgctctgagctcccccgctccccagctcccccgccgccgccgcgcgcccggccccgcgcccactcgccgcgcgcccactcgccgcgcgcccggccctcggcgcccggctccccgcgcccactcgcccagccatggcggacagcgcgagcgagagcgacacggacgcggcgggcggcggcccggcagccatgcagtcgtcctgctcggcgacctcgggcggcagcggcgggggcggcggcgggaagtcggggggcattgtcatctcgccgttccgcctggaggagctcaccaaccgcctggcctcgctgcagcaggagaacaaggtgctcaagatagagctggagacctacaaactcaagtgcaaggcgctgcaggaggagaaccgcgacctgcgcaaagccagcgtgaccatccaagccagggctgagcaggaagaagaattcatcagtaacactttattcaagaaaatccaggccttgcagaaggagaaagaaaccctcgccgtgaattacgagaaggaagaggagtttctcaccaatgagctctcccggaaactgatgcagctgcagcatgagaaggcggagctggaacaacacctggagcaggaacaggagtttcaggtcaacaagctgatgaagaagatcaaaaagctggagaacgacaccatctccaagcaactcaccttagagcagctgagacgggagaagattgacctggaaaacacactggagcaagagcaggaggcgctggtgaatcggctgtggaagaggatggataagctggaagctgagaagagaatcctacaggagaaattagaccagcctgtgtctgccccaccatcgcctagagacatctccatggagatcgattcccccgagaacatgatgaggcatatcaggtttttaaagaacgaagtggagcgactgaagaagcagctacgagccgcccagttacaacactcggagaagatggcccagtacttggaggaggagcggcacatgagggaagagaacctgcggctacagcggaagctccagagggagatggagaggagggaagcgctgtgtcgccagctctcggagagcgagtccagcctggagatggatgatgagaggtattttaatgagatgtctgcacaaggattgagacctcgcactgtgtccagcccaatcccttacacgccttctcccagctcaagcagacctatatcacccggtctttcgtatgcaagtcacacggttggcttcacaccgccaacgtcgttgactagagctggaatgtcctactacaactctccgggcctccacgtgcagcacatgggggcctcccacggcatcacaaggccatcgccacggagaagcagcagccctgacaagtttaaacggcccacgccgcctccgtctcccaacacacagagcccggtccaaccgcctccgccgccgccaccacctcccatgcagcccgcggtcccctcggcagcccccacgcaacccgcccccacgcagcctcagcatccggtgcacccctcctcccagccttaatgcatgagcttagtcagaatctccagttgggactcgtctgatggagccaccttctcaacgccaaaggcttctcctctcccggcgtacttggatctgacgcgtttgcattgaggttacctatctac

SEQ ID NO: 1047 - protein, 467 aa, Mus musculus
MADSASESDTDAAGGGPAAMQSSCSATSGGSGGGGGGKSGGIVISPFRLEELTNRLASLQQENKVLKIELETYKLKCKALQEENRDLRKASVTIQARAEQEEEFISNTLFKKIQALQKEKETLAVNYEKEEEFLTNELSRKLMQLQHEKAELEQHLEQEQEFQVNKLMKKIKKLENDTISKQLTLEQLRREKIDLENTLEQEQEALVNRLWKRMDKLEAEKRILQEKLDQPVSAPPSPRDISMEIDSPENMMRHIRFLKNEVERLKKQLRAAQLQHSEKMAQYLEEERHMREENLRLQRKLQREMERREALCRQLSESESSLEMDDERYFNEMSAQGLRPRTVSSPIPYTPSPSSSRPISPGLSYASHTVGFTPPTSLTRAGMSYYNSPGLHVQHMGASHGIWSPRRSSSPDKFKRPTPPPSPNTQSPVQPPPPPPPPPMQPAVPSAAPTQPAPTQPQHPVHPSSQP

SEQ ID NO: 1048 - DNA, 21668 bp, Homo sapiens
ttccaactcctgggttcaagtgatcctctcaccccagcctcccaaagtgctgggattacaggtgtgagccactatactcagcctcagtatctctttttttaaaaaaaaaattatctttgtatgtgaagtgatgaatatgttaactagcatgatttaatcatttcacaatgtatacatatatcaaaacatcactttgtataccattaatatatataatttctctcagttaaaaaaatcattttcatgttacttatatgtcaacattcatcattcttatctttgcaatgttttatcagctttcccagtttatctcgaattttttaaattgtcttgtacataaatgtttataatcccctaaatatagctttcacaaacatttattaattctgaactttgcaacaatccaatgagatagaaaggatcggtattatctccatttgagagatgaggaaactaaggctcagatagataaaatatatataaaataaaaaatgtctgaactaaggtagcagattgggggaagaaaagtgtaatgaaattcaatgtcacacaaaatatctgggaaatatttacaacctggattctttctgggaaactgttttaacaggtaagttgaaatccaaatatggaaaactgaaatatgctaaaaatttgtcatgcatttaatttttttccttaaatcgtcactaatattttctatattggcaaaataaagtatgtcttaaattcttaatggaggattttattttacattaaaaattaaattcatgtttttctccattaacaaacaacaggcttaatgatctgcagtggcctctgatacaaattttaaagtagtgaattacataccaagtatttagcacattaagttcatttttttcaggttgaatttaactaataaatatgaactaaaggaaaaatagcttttcagggaggaaaatgtgttataatttaaagaatgtagaagaccacctctactacctcttagtcatgtaaccttttgaaggtttttatcctttggaggtctgatttcccaatttataaaataagagcaataatgacttctagttaagtaagataatacatagaaagaacctagaatgcacctggtctattgtaagccctttaaaatggtaccttatttcatccttgaactattccaatagttttacagctctcaaaagtgtaaatataattttaacaatcttcatgtcaaaattcttcaatgacctcaaactcttaaatgtagcttaggtggccttaaatgatccaccctcatttttccccaccttcatctctccatgcttacctctccctaccctcatctttcctcactctgccctctaccaccactaccttaaactccatcttttagttacaatgaattttttgtagttacttaaatatgccatgctctgatactttcaggcttacccatataatgtttatgtttttttaacttagaatattatcctccctgctatacttgtatccaccacctgtcctccactaatccctattaatctaaggcttcacattgaatgtgacttctttcaggaagcacgccctagctcaagtttggattagatgtcctttctatagactctaatagtatccagatagagaacctatgtttggtctggccagcaccctttcttgcaagaattcctctactataaaatccacagtagtcctgctggctaactctatctctatgagtcgacatgcagctcaggcttagccaggttactctatcccctagccacagtgattgactcaggaataagtgtgaactgaactaggccagagtcctctccaagatttttttagaactttcaagatgacttttaatagctttccaactgattccaatgccttttatctctccccattccattctcaaatattaaaaggtgtcacctgctcaataaaaaactttaattagatcactactctctaccaaataaatgaaatccaaacgtaacacccagaacagtgcctggcacatagtaggtggtcaatatttgttgaatgaatgaaaaaacacaatcaaagacctcaaaatctagatcaattttccactttggcagaattttcttccaatctgtataatatatactataatcatgtcacatatcttgtactattccattttcatgacactcttccctaaacaccttattatcttaatttgatatcatattcaccaaagcatgacacaaacttattaaataatttgtcatccatatattttatattactgaagtatgagccttttattttgcctaaaaaatgttaagtctacattaaatatttaacacgttaaaagaaaatcagaattatgccactatttcttctagatatagatatcaatagtaaaataatccaacctttcctagatatttaaggttgatggctgatgacagtctctagatcactattatttatacaacagtatacttccctttattttagtttagacatatggtgttgcttttataatttgaaattttgtgatacgatccattattaaatataacatacattttcttcactcttgtccaatttacatttaacttcatctcttttctgttttagctcttctctcacatattctagttcatttctaaaagaaaatggaagagtgacattatactaaaaattattaggcctatagaagatctcaaataactcaaaataaggaagtcttaaagaccacattctttaaccaaatgtaaaaaaccaaaactgaatacttcataatataagtacaaacaagagcccccaaatatgtggaattcatctaggctactaatggattaaacagaaacttaaaatataaaaacaagttgtttagaaaataatgaacatggaaacactacatatcaaacactatatcataaattcatcattgtgttcagaagtaaattgatggcttaaaatgtttttatagttttaaaaaagagaaactaaatatcaaaatacaaagcaacaggggcagagctgcccaaggccttaggagtccaccctttgcagcagtgttccctgaatgtggtatatagagtcaaaggagattattttggagctttaagatttaatgactgccctgctgggttttagatttgcatggaacctgaactcaattcttctggctgatttctccattttggaatgggagtatttatcaattgtatcttggaagtaattaacttgttttgattttacaggtggaggggatttgccttgtctcagatgagattttggcttttggatttttgagttaatggtggaatgagttagactctgggggactatttggaaggcatgattgtatttaggaatgtgaaaagtacatgagatttgggtgcggggaagtgcaatgatacagtttggatatttgctctcacccaaatttcatattgaaatgtaatcaccaatattggaggtggggcctggtgggaggggtttgggttgtgggggaggatccctcatggcttggtgatgcctgcaatagcgaactcttgcaacatttggatgtttaaaagtgtgtcctccccaccactcttgctcctgcttttgccatgtgaagtgcctcctttgctttctaccatgagtaaaatttccctaaggccttccaagaagctgagcagatgccatcaccatgctttctgtatgacctatggaactatgaaccaattaacctcttttctttagaaattacccagtctcaggtatttctttatagcaatacaagaatgcctagtagacatgcctacaagatctagaaaacagcctcaaaagggcaaatctaagagtcattggccttaaagaggaggtagagacagagataagggtagaaagttgattcaaggggataataacagagaacttcccaacctagagaaagatctaaatattcaaggacaagaaggttattagaataccaactatatttaaaccaaagaaggcttccttaaggcacttaaaaatcaaactcacaaaggtcaaggataaagaaagaatcccaaaagcagcaagagaaaagaaataaataacatatagtatgtctggcagcagacttttcaatggaaaccttacaggcccagagagggtcatgacatatttaaagtgctgaaggaaaaaacttttaccctagaatagtatatccagtgaaaatatccttcaaacatgaaggagaaataaagactttttcagacaaacataagctaagaaatttcattaacaccagacctgtcttacaagaaatggtaaagagagttcttccatctgaaagaaaagaatgttaatgagcaataagaaatcatctgaagatacacaactcactggtaacagtaaatacatagaacattataacactgtaattgtggaatgtaactactcatatctgtttttgttttttttttttgagacagagtctcactcttgtcactcactgcaacctccacctcccagattcaagcaattctcctgcctcagcctccccagtagctaggattacaggcacccgccaccacacccggctaatttttctatttttagtagagacagggtttcaccatgttggcctggctggtctcaaactcctgacctcaggtgatctgcccccctcagcctcccaaagtgctgggattacaggagtgagccaccgtacctggcctcgtatcttaagtaggaagacaaaaagatgaactgatgaaaaataataacaatttttccagacataaacacaataataaaatataaataaaaacaacaaaaagtttaaaaccagggaaacaaagtatagagtttttattagttttctctttgtttatttgcttatgcaatcagttaacttgtcatcagtttaaaataatgggttataagatattatttgcaagcctaatggtaacttcaaataaaaaaaatacaacaaataaacaaaaatgaaaaagtaagaaattaaaatataccaccaaagaaaattgccttcactaaaaggaaaacatgaaggaaagaaagaagagaccacaaaacaaccagaaaacaaataacgaaatggctagagtaagtccttacttatcaataataacattgaatgtaaatggactaaactcttcaatcaaaagacatagagcaattgaatggatagaaaaacaagacccaacaggctgttgcctaacaagaaacacctcttcacctgtaaagatacacagagactgaaaatataggaacggtaaaagaaactccatgcaaatggaaactaaaaaagagcagaaatagctatacttatgccagacattatggatttcaatacaaaaactataaaaagagacaaagaaggtcattatataatgataaagggatgaattcagctagagaatataacaattacaaagatatatgcacccaacactggagcacacagatatataaaacaaatattattagagctaaagagagataggttccagtaaaataatagctggtaacttaaacaccccactttcagcactggacaaatcacccagactttgagcatccaaagaaacatcaatcaatctgcactttagaccaaatgaacctaatatatatttacagaacatttcatccaacaattgcagaataaacatccttctcctaagcacatggaacattctcaaggacagaccatacgttaagccacaaaacaagtcttaaaacatttaaaaaattgaaatcagatcaagtacctactctgactacaatgaaattgaactgaaagttaataacaagaagaattttgaaaactgtaaaaacacatgaaaatttaaaaatatgctcctgaatggttagtgggtcaataaagagattaagaagaaaactgaaaaatgtcttgaaacaaaggataatagaaagataacataccaaaacctatgggatacagcaaaaggagtattaagaggtgtgtttgtaagtgcctacatcaaaaaagttttaaaaagtcaaataacctaatgatgcatcttaaaaaactacaaaaagaagagcaaaccaaacccaaattagtagaagagaataataaagatcagagcagaaataaatgaaattaaagaaaacaatacaaaacatcaacaaaacaaaaagttggttttttgaaaagataaaattgacaaaactttaggaagacgaactaagaaaaaaagagagaagaccaaaataaattttaaaaaggagatgaaaagggagacattataaccaatatcacagaaattcaaaggatcattagaggctactctaagcaactacacatcaataaattggaaaacctagaacaaatggataaatacctagacacatacaaccctccaaaattgaaccatgaagaaatctaaaacctgaacagacgaaaaacaagtaataagatcaaagctataataaaaagtcttccagcaaagaaaaacccaggacctgatggcttcactgctgaatttttcaaaacatttaaagaattaatatcaatcctacagaaactattccaaaaaataaaggaggagggaatatagctaaactcattctgtgaggcaagtattaccctgataccaaagccaaataaagacacataaaaaaaggaaactaaaggccaatatccctgatgaacattgatgcaaaaatcttcaacaacatactagcaaaccaaattcaacaatacattaaaaagatcattaatcataaccaagtgagatttatcccacaaatgtaaggataatcaacatatacaaataaatcaatgtgatacattatatcaacatgctataggacaaaaaccatatgatcatttcaattgatgctgaaaagcatttgataaaattcaacatctgttcatgataaaaaccctcaaaaaacggggtacggaaggaacatagctcaacataataaaagcatatatgactgacccacagttagtatcatactgaatggggaaacactgaaggtctttcctcttagacctggaacacagcaaggatgcccactttcaccactgttattcaacatagtactggaggtcttagctacaggaattagacaaaaggaagaaataaagggcattcaaattggaaaagaagtcaaattatccttgcgtgcagatgtatatttcttggaaacatgtatatttccaagtataatcttatacttggaaaagcctaatgatctcaccaaaaaactattagaactaataagcaaattcaggaaagtttcaggataaaagaatcagtagcatttctatatgccaacagcaaacaatctgaaaaataaatcaagaaagtactcccatttacaatagctataaataaaattaaacacccagaaattaacccaaccaaaaaagtgaaaaatctttacaatgcaaactataaaacactgattaatgaaatttaagaggacacacaaaaaaaggaaagacactacgtgttcacggactggaacaatcaatactgttaaaatgtctgtactacccaaagcagtctacagattcaatgcaatctctatcaaaataccaatgacattattcacagaaatagaagaatcaatcctaaaatttatatagaaccacaaaagacccagaatagcccaagatattctgggcaaaaagaacaaaactagaggaattacattacctgatttcaaaatgtactacctagctatagtaaccaaaacagcatggcattagcataaaaacagaaatatagaccaatgaaacagaacagagaactcacaaacaaatccattcatctgcagtgaactcatttttgacaaaggtgccaagatcacacattggggaaaggatagtctcgatacacagtgctgggaaaactggatatccatatatccatatgcagaagaatgaaactagacccctatctcttgccatatataaaaatcaaatcaaaatggatcaaggacttaaatccaagatctcaagctatgaaattactaaaagaaaccgtcgaggaaactctccaggacattggactgggcaaagatttcttgagtaatatcccacaattacagacaaccaaagcaaaaatagataagtcagatcacatcaagttaaaaagcttctgcacagaaaaaaaaaaatcaacaaagggaggacacaacccacagcatgggaaaaaatatttgtaaactatccatctgacaagggattaatacacacaatatataaggggctcaaaaaactctatgggaataagtctaataatcctatgggaaaaaatgggcgaaagatctaaataggcatttttcaaaagaagacataccaatggcaaacaggtatatgaaaaggtgatcaacatcattgatcatcagagaaatgcaaatcaaaactacaatgagatatcatcttaccccagttaaaatggcttttatccaaaagtcaggcaataaaaaatactggcgaggatgcagagaaaaaggaaaccctcatacactgctggtgggaatgtaaattcgtacaaccactatggagaatggcttggaggttcctcaaaaatagagctaccgtatcacccagcaatcccactcctgtgtatacacccaaaagaaaggaaatcagtatatctaagagacatttgcactctgttaattgaagcactgttcacaatggccaatatttggaagctatgtaagtgtccatcaacaggtgaatggataacaaaaatgtgatgcatatacaccatggagtactattcagccataataaagaatgagatcttgtcatttgtaacagcatagatggaactggaggtcattaagttaactgcaataagacaggtacagacagacaaactttgcatgttcacttatttgaaggagctaaagttacaacaattgaactcattaagatagagagtagaaagagggtttccaggggctaggaagagtagtggtgataggaggaaatggagatggttaatgagtacaaaaaatagaaagtgaatcacatctagtatttaatagcacaacaaggtgattataatcaataataatttacatgtactttttttaaaagtaaaagtataattgggctatttgtaacacaaaggataaatgcttaaagtgatgcataccccatttactctgatatgattattacacattgtatgcctgtatcaaaatgtcttatataccccatacttatatatacctactatgcacccacaaaaattaaaaatcgaaaattaaaaagaaaccttaaaagaagcaatggtaaaatcacaaaagacaatcaagtttaataaaaaattgaaacctttcatataataaaaagttctctgaagttaaaggaaaacaacaggttagggaaaatatgtgctataaataaaccaggtaaaagattaatatatttttagaagcttaagcaaatcaataaaaaaaaaaaacctcaaaagattagagggcaacaggtataagcagacaattttaaaaagaagaaattctaaaatcaaacttgaaagcttccaaagcttatccaaaaactaaaaatcacaaatcataccaaaaatgacttatccttatcttttaaattatcaataaattaataatacccaatatcaattaaaacattttaggaccagcattttcatataatatttgttgtattgcatggtttacaatgatacaacctattggaaactaaccatcaagccatagaaatcattattactatgatccaattcaaaataaggaaaaagtatttatgtgccaacatgtttactagtattatctatgaaaatgaaaaactaaaaaacataaatatccaaaagtaaaaatgactaaaataatgtcattacatccacttgaatgactggtagatgggcattaaaatagatgactgtgaaaacacataaaaacattaataatgctaaaaataatattaaatggaaaaaccacatacaaaattatatatgtatgattataagcaatgaccaaatacattctttaaaatatagagtgggtacacctatgggaagctgacttccctcagtcgggcacttctcatgggggctgaacatggttcctgccattctgttacccactctcccaggtgagccctggattggctcccagaacgcctttgtaaaatcagtagccatcctgcaggcaggcgggacaacaggggcttcagtagcttcattttcctgtcttgcagacagagacccttggctaccactgtgctgctaataggataagtactctgttgccggattaccatgccttttatacaaaaccaaattaacttacctaatacctgacacctctttgggctctgaactgctttctctcatcaagcatgctagccctctagacagaattctagaaatttggcagatagtggaagtctttaattgaacttactccttatttgactgaaaagagttttaaattctgagctcctgagatactgactagcaaccatggaatgaatgtgtgaccagaaagtggctttgacaccaagtgctgctgtccctttgtaattggcttctaacggattcaaccagaaataactgataatgtgaatttgtgttaattgttcacttgtaggaaaatagaacacgtatcaccctttgttaggtagacatgaacttttcctgcacaaagccttgcttttagagaatgcccaataaggcaagaaaaagcatagtaacttgtgctttgagagctcaatatttgtatcttatcagtacagaagaaatatttctgtgtaacttgatcttctgtctagtacttgtcttataggtaaccaacactgaaaactttgtagtgatggctaccaaagaaatacaaaaaaacaaccttttatttccaaattgttaaagagccagccattgatgctgctacctgagttccatgctcaagagccattgtaagagattaaggggtttctaggtttttggtgattttttgtttgtttttttctttgttttttagtttgttttttttttagttttttttcttctttctttaattttttgattaaaacatacacacagctgttagcataaagtcgtggggggcattttctgattaactgcaaagcccaggttgcctctcgtgaaaaaatcctgtgtcttgatagcatggatgctgtgtgtgtgcatgtgtgtgtctgcattcatgccttaactcgggttactgctcaactttagttcttgacttagtctgcaccatcatctagattgtattgtacatctcggtctgaacttcatcctagcaaaaacaaagttgcaggcacaacagtttaagaatgcattcctccagaaaagtatctggtcaggttcaccctgagccttctttggacttaatttggaacttagcctagaaagcaaaagtggactgtccaacagaaagatgtcaacaaggaaaagaggagagccaagcgctagcatgccttttgcctctgcatatctgtgcacactgtatgttgttcatgatagcttgtctacaacttgactaggttggagttctggtaatagtggcaatcttgacattcttggtcagagtttagagagatgtaagaccttcaactaatgtcttatttactcctttatgttgattagtctttgatacatgtgctgaatcagaaacctaaataaagataattttttaaaatgtaaaaaaaaaaatatagagtgggtataaatactctagtattataatagttcatatgattagaagtaatttttaagatttctatattttattaaatgtgattaatatattttcttaattaaatattaaagaattagaaggtttatgatgctttaaaatttctgtctaatctcactaacttttaacactaagtataaagtagacattattataattttatttttaagcaggattccacaacagtgatttatatctaatttttactttataaaatattcaacagcagtccaatttaaattaatgataacaagttaatagaaaagaaatatcaaaatcttttgccagacaaaaaaaggccaatttgttagtcttgccttaattgggtttctgtttcttgaagattttctatttgtttcaacatcctttcttcttgctttttgttattctaaagaaataatgttgtttatatcaattattttgtttaaacaaaaataaaatttaaactactatttaagacctttatctatcagcataaaatttatttagttatatataaagcaaaaaaatgggcttttcaacttgtatagttccatactacttttttaagccttactttaattattctcccaacaatctctatataacagttaacaaaacaagtatcatttggttttccagcgttactttgagtctgtatcctttgttcatattgtcacttcaagtaatgttttccattcattgttacctactgaactcataattcaccttttaagaccaaaatcaatgctatattctctcagaagccttctctttatccaaagcagaagtgatcctgcaaactctgatagcaccttgtcccactaacaacatatatgacatactattttgcttaagttatgtgagaaattactattttttattaagtcataagttcttaaagagaaagggtgacattttattcatcattgtatcctccacaatcttgtatgacttaataaatacctattgactaaatactttttaaaaatcttgatgcctaaaattaaattaactttttctagtaatggcttccattttaattttaatcagagggtagcctctgttgcctattaccaccctataagaccaatatgcatatttttctgctaaaacaaagttttagctctaaagcaatcagactttaaaggtcaaagggtctttagaggtcatctattctaacctgctaattggaagaaaactaagtcaccagcactttctttttcaactcacattaatatcttcttgctgattcttgagttctagggtcatatcacttgtttcctgtgtgagctctttgttttctagtgaaagcttgttgcagtgtgaagttaattcagtattcttaagcctattttttaaaaaaaaaagtcataccaaaatatttacaaatgtaatgacataatatggaattttattcaacataatgataggggaaagggatgaagggctgggggaaaaacatgaaacaaaattgactattggtttataattcctgaagctgggtgataggttgatcattacattattccttctaatttttatatttttgaaatttttctttactaaattttcaaatgtcatacaatatatttccttgcatgttccctgtttgctcatcctttcatactttccacaaattttgaagagcacattattttcttcaataattttttcctctccattagactgtctcttagaagttatttcaaacttcctataacctgattaaagtagtacacgaagcattagctgtgtttaattaagatatttttacctgcacgttgtgcacatgtaccctaaaacttaaagtatttaaaaaaaaaactgaatttaacttttttgcacaacacctaacttgctcttaaaagatctcaaatgttctactttggaagagagattattgctgtattgcttacatccaatatcaattttaaatgaaggcggaggagtatgtggctctacagagtgattttaggagcatctattatctatttctacttaatgatactggaaattcatcaaagaggagataaagtgtttcactaagccaatgaaaagttgaaaagcaaatatactaaggataacaaatttacattaaagtacaaataactaaccagtccattcattaaaagggacattagttaatagatgagtttaacctagggcccttaaaaaagtactattgaaaaggtaccagaaatagagaattagataaaaaggaagggagaggatgctgcataaactgtttacttctcatatttaatctagcactgagaagccaccaaaaggggaaaatcatgctcaccaccactatactggctacttgaatttacttttctctgagtaataatacaataataatttccccgctttctctccaaattaaacttactgagtaggtaaaatcatccaattcaatattttatttggataatgtaagaaataattttttattttgacactttatcagcaaaaacctataaaataatttagcaaaacaaccaaaacaaccagttagaactgaaaatgattatttttatggggaactaaatacctctaagaaaagtaacacattgatctaaagtggttctcaaatttgggatgtactctttctttatgtcagtgatatgtactttctttagcaatgaaattagcacattatttagatccttaagagtaaaatacaatttcaaatccattcaaataaatattaaatataatttactaaattattatttattatcagaaagcttaggaattgagtacataaactatttttagataaatggaaaacatacttctcgttttcaagctcagtttttagatctttaacctcttttgaataatactgttcacttgtggtaatggcagttaactgtatttccaaatcatgtacttctttctgcaaaataaacatatataactatggcaagtgtttttcgaattttctcatttaaaaggtatagtcactgtgtaattaagtcatatatttggcaaaaatttggcaggttatgtcaaatattttaaacgagtaaatttaaagtgaataatcactataattttaaaacaatgaacaatgacatattcagtataagtaaattctatctcgatattgtaaaattcaaccagaaaaacatttatatgctataaaatattctcactctgccaagtaactaatttctattaaaatgttatattatcaaggagaaatatattaattgatgaaatcaggtagtgtcttaaaaaactaaaatgttcttattattataaaataataagaactataatgttcttattattataaaaagacaagatgtaatactgtcatggactggaaacatactttaaaatacaaattctaaaactataacatgagcactataaaaagtactataaactaagaacctaacttaatgaagtctaaatttcaaatgtaccaattaagaaatacttggctaggcatgatggtgtgcccctataatcctagctacttgaggggatgagccaggaagcacaggagttcaaagctgcagtgtgcaatgattgtgcatttgaattagctacttcactccagcctgggcaacatagcaagactctgtctcaaaagaaaaaatactcaagacatcaagaaatatcactattataaaccatagcataatgcatcatattgatcttttaaatgctgatctttctcacattataatatgggggttgtctagatgtgttttaaatcaatcataaatatattaatgtaataataaatgcttggaaaggaattttgtgaagaaatctttaacaaaagaaatacttataccataatccataaatctatgttctattaacaaaatatttaaaataaaaatgtttccttaaacaaacctctctggcttggagaagaccaattagttcttgttctgttccttttaattcttcagcaatcttctcaaattgtttattttcatataaaagtgtttccttttctccctatttataaacattaacaaatcaggaatgccaaaccatacacatagtgaaagtaatcaaactgcccaaatggagctgtggaaagaactatgagcttccccctggctaaaattctttaaaaagagaaaattagtcaatattaagtaaattcaaagactaaacatgatgacagacaattcagtagacacagccctggaacacaataattaattgtttagttacagatgattaatttctcatcattccttctactatccaacacagcatatatttatgaactcactttttactttgtcttcccaagcatgacatcacaatgattttataaaaggcctcacaataaaaggtcctatattattaaccataaaaactactaattgtagttaaggagtttgaattttatctatagacaatgtggaatcatcataaatgttactgtaacaatatataatcctatttgcgattttaaaagataacactagcaatagtgcagaagaaagcttaagtagggcgaacctaaaaacaagaaagccagtaatgagactactgtgccaaaacaaatgcaagatgaaaagtgtttaaattatatcaaggactgtggagacagattgataacaataaccatggtttcatgctttcagatgacttctgtatgaccagccctcactagatgcttaaaatatattttcattctttacactactctatggaagtcagatttttatgtctccatttgaaggatcaaaaaatagaagcagtcttttagctttcagtatgtcactataatctcatgcccagagaccaactctcccactgaaaacttctataaactctggacaaaatacataaatacatataaacgtgtgtgtgtgtgtgtgtgtgtgtgtgtgtgtgtgtgtgtacagcaagggagagagagggaaagaaggaaggagggagggagggcgggggagagagagagagagacaatatataacctaaggattttaacaagtaaaaaaaaaattaacacaagtggctggaagaggagtgagtttgtcagttttggtagctttgtcccaatggtgaaatgtcactgctaagcagtgtggtataggcagctaaaactacaatagaaaccccaccatctctcttgctagaggaacctggtagaaccagggaaaggagccctgggacccacaaccagctgccagaatataaaggagaaatcatacagaacaaagaaccactgaaagtaatctcctgattctatgtatgaatactacacaaatttaaaaacaacccatgaagcatacattcatatacagagtcaaaagtagtacaccaaaggctcagagaattaaactaagatttgaagcaccatttatagaaggtgagataaagtttatttttgaatctagcaaactgatagataaaacaaaaacatttacattattcagaagaatgtaacagaatctacataatataaccttcacaatgtcctgaatataatccaaaattattcaacatacaaagaactggtaaaatgtcaacattctcaagggaaaaggcaacagatatatgctaaccccagtataaccaagatgtgagaactttatcagatgagaactttaatgcagctaattcagttttgctcaatcaggtataggaaatactcttaaaatgaataaaaagatagaaaatctaaggaaagaaatagaaaataagaacaaatggaaattttagagctggtaaaaaaaaattcattgaatgctcatgggagcacaatggagattacaaggaaagagacagtgaatctgactatcagaacaacagaatcgatagtctgaagaatacagagaaaaaacattgaaataaaatgaatagcacctcaggaacccgtggaacaatataaaaagatcaaatcaatgtataattgtaatcttagaaggagaagacagcaaaaatagggcagaaaaatatttaaatggccaaaacttcccatatttgaagaaagttaaaaatttacagatttatgaagtgcagtgaatctcaaatataataattcaacttcacttacatactgctgaaaatcaaagttagggagaaaatcttgaaagcatgtgagtctctcattagaaaacatggaggatcaaagacaataagacatcatctttaaggtgctgaaagaaacaaaactgtcaacccacaatcctataacaaaaaaaaaaaaaaatccttccagaatgaagagtaaataaataatatattcaaaaagaaaaactaagaaaatttgtcagcagcaaaactgcactacaagaaatactaaaggaagttctttaggctgaaggagaacaatattagaggtaaacgtggatcttcaggaaaaaataaagaatatcacaactggtaaatattgcaataaatataaaagatcatttttcttcaagttatttaaaaaacatatgactactaaagcaaaaattatagcactgtcttggaagatgtaaatgcatgtaggtgtaatatatatgacaactctagcataaaggacaaagtgggaaaaggacataaatagggaggccgaggcgggtggatcacgaggtcaggagatcgagaccatcctggctaacacggtgaaaccccatctctactaaaaatacaaaaaattagccaggcgtcatggcgggcgcctgtagtcccagctactcgggaggctgaggcaggagaacggcatgaacccaggaggcggagcttgcagtgagcggagatcatgccactgcactccagcctgggcaacagagcaagactccatctaaaaaaaaaaaaaaaaaagtttcaacatttaacatgaagtggtacaatattaactcaatatagacaaggtaatggatacatgctgtaatccttagaacagccacaaaaataaatgcagagaagtatagataaaataccagtagatacattaaaacggaatgccaaaaaatattcaaataacccaaaagaaggcagagagtttaaaagaggaacaaaacaaaggagcaaacggaaaacaacttttaaatggtgaatctaatctaagccacatcaacacttaaacaacaatttttaaagatatcaatggtctaaattctccaattagcagtgattgtcggagtgcataaagaaagaagacccaattatatgcaggctacatataagcacatatgtacaaatataaagtcaaatgtaggttgtaagatatatcatgcaaacaacaagcataagaaacatggagtggctataataatatgttaaaatagactttaaaacaaaaaagtattatcagaaattgagggcatttaattataatcaaagggtcaattcatcaagaagatatggtagttagatataaatgtgaagtttatagcagaagttcaaaacacacgaagcaatcactgatagaattaaatagataaataaacaattccaaaatcctactagttttaactcttctctcagtaaataatagaattagacccaaaaattcaattaaaaacatatatttgtacaacaccatcagccaactgagcctaattgacaattacagaacactctacctaacaatagcagaatacatattattttcagtgcacatggaacattcactaagatatatcatatctgatacataaaacaaaccttaagaaattttttacaaaagtacattctctgaccataacaaagttaaactaggaaagaataacaaaaaataacaggaaattctccaaatacatggaaattgaacaatagacttctaaatgggatcaaaggaaaaccctcaagagaaatttaaaactattttaaactaaatgagaatacaacacataaaaatttgtgaaatgcagctgaaaaggtgactagaggaaatttatagcatgcaaatgcttacaaaaaagaaaggtctcaaaacaatctaaacttccaccttaggaatctagaaagagagcaaaataaactcaaagtagcagaaggaaggaaataataaagatatgagcagaaaacaatgagattgaaaacagaaaaacaatagaaagaatcaatgaaatataaactaattatttgaaaagatctatgaaattaagaaacctctaccagactaataaaaaaggggccggtcacggtggctcacacttgtaatcccagcactttgggaggtcaaggcgggtgcatcacttgaggtcaggagttcgagaccagcctggccaatacggtgaaaccccatctctactaaaaatacaaaaaattagtagggtgtggtagtgcatgcctataatcccagctactcaggaggctgaagcaggagaatgacttgaacccaggaggtgtaggttgcagtgagcctagatcatgccattgcactccagcctgggtgacagaacaagactccatctccaaaaaaaaagagacaaaaaagagaaatgacacaacaaccaatatcagtaacaaaaagaaggtaatcctacagactgtacagatatttaaaaggataacaggaaatgctacaaaaaattctatgcacagaaatttgacaacttgggggaaatggactaatttctttaaaaccaaaaactaccaaaatcattcaagattaaacaggtaacctgcatagttctataacaataaaaaaaattaaatccatagtgaagaccttgccaaaaagaaatctctagacccaagtggtttcactagagaattctaccacttaaagaagaaattataccaattttacacaatctcttccagaaaacagaaaagaaacaaaagcttctatggagcataaaacaactctatcttggaagctaatctaccatgttggcttctgcttaacccctgttccagaaagtcctctaagatttccagtttatctattgttccttgtgtacaagaaggtacttcccgtaaatcctgcccttaggacatatttctagtattgcctctgaagcacatgtacccctcctctaaggtatataatccttgggtctgggggttaacgatgcagggattcatcatcttgtcttaccactacttgagacacacatggcttctgtttgtaagtccctattaaatgtttccaagaaactggatttataagcctctttcttcagcctctaagcttctttgaactttggaataggtttgcaaagacctgcctctgtgaaacagcttctcagttcattttacaaagccagcattactttgtctccaaaaccagacacagatagcaaaagaaaagaaatctacagaccaatatctcttatgaactcaaatataaaaatcctcagcaaaatattaacaaataaaattcagtgaaatagaaaaaaagtacaatactcaacaccaaatggggtttatcctggaaatgcaaggttcattcaatatttgtaaatcaatgaatacaccacattaatggtctaaagaagaaaaaccacatgatcatataaattgacacagaaaaagcgtttcacacaattcaacttcaattcataatataaactttcagtgaactagaaatacaagagaactttctacaaaaaacctgcaagtaacatcataacttaatggtaaaacactgaatgtttttctcttaagatcaggatatcaaagatttacaagctcaccactgttattcagcatactggcagtctgaggccatgcaataaggcaagaaaaagaaatcaaatgcctatttggtagttatttaaaatacctgcaaaaagagaaatacttaggtataaacctaatataacatttacagtactgtatgctgaatactgcaaaatgctaatgaaataaatcattataaagaagatctataaaaatagaaacagatactacgttcatgtactagaagattcaacgtactaatgatgtcagttcaacctgaattaatctatatatttcacacaattccaataaaaatttcagcaagagttttttaaggtatagaaaagctaattctaggcggggcg

SEQ ID NO: 1049 - DNA, 1668 bp, Homo sapiens
gtacacctatgggaagctgacttccctcagtcgggcacttctcatgggggctgaacatggttcctgccattctgttacccactctcccaggtgagccctggattggctcccagaacgcctttgtaaaatcagtagccatcctgcaggcaggcgggacaacaggggcttcagtagcttcattttcctgtcttgcagacagagacccttggctaccactgtgctgctaataggataagtactctgttgccggattaccatgccttttatacaaaaccaaattaacttacctaatacctgacacctctttgggctctgaactgctttctctcatcaagcatgctagccctctagacagaattctagaaatttggcagatagtggaagtctttaattgaacttactccttatttgactgaaaagagttttaaattctgagctcctgagatactgactagcaaccatggaatgaatgtgtgaccagaaagtggctttgacaccaagtgctgctgtccctttgtaattggcttctaacggattcaaccagaaataactgataatgtgaatttgtgttaattgttcacttgtaggaaaatagaacacgtatcaccctttgttaggtagacatgaacttttcctgcacaaagccttgcttttagagaatgcccaataaggcaagaaaaagcatagtaacttgtgctttgagagctcaatatttgtatcttatcagtacagaagaaatatttctgtgtaacttgatcttctgtctagtacttgtcttataggtaaccaacactgaaaactttgtagtgatggctaccaaagaaatacaaaaaaacaaccttttatttccaaattgttaaagagccagccattgatgctgctacctgagttccatgctcaagagccattgtaagagattaaggggtttctaggtttttggtgattttttgtttgtttttttctttgttttttagtttgttttttttttagttttttttcttctttctttaattttttgattaaaacatacacacagctgttagcataaagtcgtggggggcattttctgattaactgcaaagcccaggttgcctctcgtgaaaaaatcctgtgtcttgatagcatggatgctgtgtgtgtgcatgtgtgtgtctgcattcatgccttaactcgggttactgctcaactttagttcttgacttagtctgcaccatcatctagattgtattgtacatctcggtctgaacttcatcctagcaaaaacaaagttgcaggcacaacagtttaagaatgcattcctccagaaaagtatctggtcaggttcaccctgagccttctttggacttaatttggaacttagcctagaaagcaaaagtggactgtccaacagaaagatgtcaacaaggaaaagaggagagccaagcgctagcatgccttttgcctctgcatatctgtgcacactgtatgttgttcatgatagcttgtctacaacttgactaggttggagttctggtaatagtggcaatcttgacattcttggtcagagtttagagagatgtaagaccttcaactaatgtcttatttactcctttatgttgattagtctttgatacatgtgctgaatcagaaacctaaataaagataattttttaaaatgtaaaaaaaaaa

SEQ ID NO: 1050 - protein, 56 aa, Homo sapiens
MVPAILLPTLPGEPWIGSQNAFVKSVAILQAGGTTGASVASFSCLADRDPWLPLCC

SEQ ID NO: 1051 - DNA, 26564 bp, Mus musculus
  misc_feature (1)...(26564): n = A, C, G or T/U
atttcatgaatagtgtgctgggggaacaaagatagaccatgtatgactctaatggcctaggacttaggcacacactgcaacaaacatgaagatctgaacctttttcatagctcctgctcattagtcatagttgtgagccttgaatcccatactcttgtcgatgcattgtttcctcatctatagggatgttacctgccttactagagcttttatgtgataacacagagccttgagaatccatcattaaaaacaaaacaaaacaaaaacccaaataaacaaagtaaaaaaacaaacaaaacaaaacaaaaacaaataaaaaactaccctcgttggcctgtaactttccatctaacccaggctagcctgaattactaatcgtcatatctcagttgcctgaatgctggggttacaggcctgggccaccacagatgggtcatgagatcctgcatcttacatgctgaatttttctctgaggcaggtatcagtgtgtaggttaataagcaggatgcttactctggagtacattgggatcaacaattgtgaaacgcatggaaggaatcaggattggaaggagccatcaagctgtgaaggtgtctgagcatagcatagcctcagagagagctctgcatagaccacactagaatgctctttgagaactgtcctgaattgtggtggcatgacggttgatcagtgacaatgtagctttgcctggaaggatacttgagtctgaccctgttcagctaaagttgtctccaaagaagctggcagctgagtgtcagttggttgtaccaagcaactgtttttaatgatggatgcatggtacctagcacaaaataagcaatcagtatttagggaatgttttcacccaagcactattcattcagcaagtggttactatttggacaatgttctactactgagctccttatacgagtcgtgcaccatggctacaaataggaagtttataatatgaggtaggttcaacactggcttcctggaagagtagacctggagatgtgacttcctggatcatgggccctgggactcggtatttccttgtctttctagaagatcatttcttgagatgaggtgcgaggtgtctcaggggtgggactctccatcacggcccacctgatggtgcacctgtgcaccacgggaaactccctgctaaacttacattaactgtttgaattcccagtagcttggaacttccccaggggtcccattggctctgtgactttccatcacttaagtaattggaggatggagccgaatggaaataatctatacgctttcttctgtgagtcaccaaaaactacagcccagagtgtgtgtaactgcttgacttacttttcctgtatgcaaatgagctgtcattacagttcagtaagtagagactctacagagtgaacatgagaccattatagtttctatttgaaaaagacagagatagcttggtacaactgtctgccttggcaagagcccttggtagaaagtgcttttgggttgggaccttacaactctttgggaagtgtttgttggtacactctggccccattttccagctcttgccttgaccaagacatagcaggaagtagatgatctctagtgtggggtaggttgtttttatctccacaagtcacccaggtgatcagagaagctttccggaaagcaatggctttgatgttctgggtgacaagctgtgagtgtgcggcaggaaaggagggttttgaggttggagaaatgaaactactttgggtggtgacttcatcacttgacacccctatggtaggaaggttcttataaaagaaaggtgaatgcaagggtaggtatgaaaaggaaagtttgaggtggacaacagtgagatgacgggcttctcatggttcagggaaatctaccggcaccatcgaccttctaggacccttcttcctcccacacttcaccgaatcctcagtttcaccagtgaccatgtttacacctgttatctgctccattcttcgcacatgatgttaccctgaccccatgtgtgcctactgctcagggagcttggcttagaaaccagagttcttgggacaaatagcctttctccatagaatcatagtggccctcactgacctgagagcatcccgtcttccagttcccagtttgtagaagctataccttcccctacccctccgagcttctcctctgtggagccccaatgttctgttcatggctcttctgagccttggcttcttaagccctaactgggactgatagcagtccctgccattctctttaggtcaccgctgtgcagaggaaaggcttcacacactgcctgagttgcatttcttgagggtgtttttcctcgatggctttttttttttttttttagctgtgctggggagtcaaggatatatgacctcaccaattagtgatcaaatctttgacacccttaggtgttacccaggatactagtttagccatttggaaccaggtgtgtctaacctgtggccaataggccacttgagtcttacgatagctgttaatgcagttcactactttcatagatgacactatcatatcgcaatagcaaaaggttggacagctctgtaagatttagcccatctatcttctgaaaacaggaatatgtgcaaggaatgagtgactgctgtgtgccagggaagaaacatgatgctgcgtgggactgattactgcttcgtgctcagtgctggctcacacagtaatgtgttcatttctttggtgttttgttgttgttgttgttattggtttttatttgcttgtttttgttttttgtttttgttttgtccctcttttgtatttaaaacaaagcaaacatcttggtctatttatttcttttcaagccccttttcagtaagtgtctaagtctccaagtgcttgaggcttagtaacttataaagcaaagatgcttgtttaggtttgtgtttctgggctttgggaagttagttcatggttgggcaactgcatctgccttacaatatggcagaagtcggaaggcggagagggtgcagtgggaagagatagtagagtgagaacagccttgcttgtaactaccaagcactgggatagcaaacactcaccatggtaagaattaacccagttctctaagaaagctccttactaagcaggaggatcaatgagtgacagcagttagacactgagaataacaaaatgcttatcaagcccctactgtgagctggggctgtattgtgttgacttcctcagcatccaagaaggtaaccacggctgctatctatctttgaatacaagtcagggtcagagaaccgaagagatacttgctacttactgggactctcattttgacccctggcagccagtgtcctgagattgtccctgatgctttcatgcttagccttgatggatttcatagaattcagcaaggatgggagccaggttgggccaaccctcctggaaccatccagctgtatctgtattcgatctttttcagggccttctttggggagagcaaataccctctgacatcacacctgtgctcagaaacgtcttggttgaacagccaggtatttggctttcctcagctgctacaggtgccccagtctaccggcccgatctatttgcagtggtcagatggtgtttggatggattcctgagaaatccatccatggtcacttattttctagcaggctcattgtttcctgctcagtgtgtaagatctgctacccatggctgactgatcgtggcaacatctgtgcggccatttggcctcacggtccgagtaaacaaccagctgccccagatgaggaagctaaattactgagaacagaactggtgagcctctgttgtgatggattgtgtctcccatctccatcctttaatgatggaccccctgccttacccaggcactgcttatctttgttgaagctcctttgccattgtatattccccccccaccccccccttgctgcaaagaagattacatggccctacctttggccttatgatgtggagaagaggatgagggacctgagcatacttggaattctgctgcagataccaaagccaaagggctaaggagtgggcttccaatcagccttcttgtctcttaattcttaaggatcttgggtggcctggatctgcctgtcacagatactgagtcctttgttttgcctagtcacagaaagtatgacataaactttgggtcccagcagttgacattttgcgatgcctaaaggcctttagcagacccatggtttgcttggccatgtcagatgtcagggagcaagctactgtcctattcttggggacagtgttggcagtgatatgacaagggaacctgagcagcagcatctgcagcaggctgaccccctccctaccctcttccttctgctgggttgcctgagggacttctgaacagatatcctcaaagtggacagatgagtcctgtcaccctgtgtgcacatgtctcttatccctagctcatctctgtggaagggtaggaatctgtgactctacaagttctatgtgtgacagtaagattgagacttttctactcttcactgagcccctgggactcccctccccccatgctcttggaagaaacttagaaactttaatttcctaattttcatagaacatcactccttatgtatgatcaaaaacatcaattaaaaacactcaacagtttgactgccttgggaagaggtccttgtgttttttttcctctgtcaggagctagtatgtggtctttactgtgtccttgcccttctcctattgccaaggagacagagagccaacttagaaaccaacaactcagccatactgatttattgttcactgttggatggcttccttcaaatgtctcatttggtcttgctattgcatattgctgccacctacccattccacagatgagcaaactaagcctgtgtactctcctccatgggtaatgtgatgcagtaagaagggggccgacctttggggttttaaaatcctgttaggagtcaatgaagaagtctaaagcttgtagtagctgacatgtctaagtgctttgaactctgctaagactcactttatacccagaatactgctgaaaaaaagacagagactcagagagctgaaatttttgatgaggtgcctccagagaagggacttgcagatcggtaatggtgggctgccctctgaggggtctgataagaagagctcaccaacatccaggaagctatgcgctcggccttttagggtcacaaagtgattgcagtgtgacactcagactagaagtgctttcctggtataaatggcagtgatgtgtgggtggccacttgctgagtacagaggtgctggggacaggagggcatctttctgagtccaccactagtcagcaggactttctggggaggggaattcacctgcatctgctgggaactgaattctgggcactggctgtgtcgaggcggacatccactcagccttgcagggttttggtacaagcacattcagaaaactatgacaacagaccccagataaggaaattatggctagggtatatctgaactacgagggggaattcagtaggagggatatatactatgagccatgtgccctcttctcccagctccgtgacaaggacagttagccaactgctcctagtttaagggcaacttctccatggaatgttcaagtggcttttatgctgagtcagcgccaactaagcttgatcttattagtgtcctgactgccgataccctgggtggtttgcaggggaggggggtaggaaagaggtctacagggaagggaacatggaattgtataatgtggctgtctccaggtaccacactgtcgtatcaatctcccggttatggcaggagaagtcatgtatgagtccaacaagacctacttggcactttgcacccagctaaaacagtcctcccttggctcatgggacctaacacttgaattcctcattctttacactactccttctcttccagccacctcctgaagctgttgcaatgatcactgaggattagagtcgccgtagagactatggtgtgtgtgtgtgtgtgtgtgtgtgtgtgtgtgtgtgtgtgtctgtctgtctgtctgttccctgcacagttcaccatgcctacagtgagtggtaaactttgctaacacttaggctaagtttatcccattcagcttctgtggcctacaccactccactgtgtgtacataatgggctaggccaggaacacaaggctgttatcagaatggagataggtttcttattcttcagcacctagaattcttgcaatgagacgaatggaaataccagtgaggaagggaacatgattggtgacgggtggggacatggcactcagtaagaccaactatcagctgtgcccttcttgtttgtgtgacttaggaacacaaagagatcaaaacaggaatacaatgtctaatatgaagcttagcacataagaattgctcaacaacaattacattttttttaaaggggggttctacaaaattgcttagtgggtaaagacacctattgctaagcctgatgaccggagtttggttcccagaacttacatggtggaaggagagacctgactccagcaaaaatctgtcttctgacttccacacaagggtgttcccacactcatatgtgctcaagtaaaaatggaaaagagaaaaaaggagaattattcaataaatgcccattttccctgcatttctattgtgttgttcttttcggactgagtcttggtgtgtggtactggctggatacaatatgtggcctaggctagcctggaagtccttctaacttttctcctaaggataggattacaggctcttgctaccctacttggtctcctctcctctcctctcctctcctnnnnnnnnnnnnnnnnnnnnnnnnnnnnnnnnnnnnnnnnnnnnnnnnnnnnnnnctcccctcccttccctcccccctctttttttttcttaaagaaactttgtttatttgatcaatcaacctattttgtgtgtgtatatatctgttttgatacttgtaggcatagacatggaagtcagagaataacgcattagagttagctcttttcttctaccatgtggtttgtgtgactgcactcaagttgtctggcttggcaacaagtgtctttaccactgaggcattttgccatctgtttgtttttagtttttaaatgaataaaatatccccttccccaagccattctgtactgatactaataagcctctctctttttcttgcattttctagtataccctttaagcgttccagaaggattttgagatcctttcctaaatcaaaggtggaatatttggggatttggaaaattgaggtaagtaagggctggtctcatttcgagccttttggaaacaaaatttagctttgagaatgaaaatttagctttagtctttgtagcaggatttggggtacgttttagtgtgtgtgtgtgtgtgtgtgtgtgtgtgtgtgtgtgtgtgtgtgtgtttaataggctttcttgtgtttaggaatctgatttcctagtcatctatatcttggctttctttctcagcatttttttccccacttgcttgactgtaatgctaacatgctctctctgctccaacctggagaagccagtctctcagaagaaccagttgtgttactttgctgtgagatgcctgccctaagagaggagcagaaggtcggaacgggtcctctaatgtgataattaggtgagaacacatttgggacacatgggctgtgagatgttcctttatgcctagtacagtctgtgttttctcctcaccctccattacatgttggaagcatgctaagaccatggctcctctggtgggggtaagaagtgaagcccaaggtctttcttcaaacctaggctttcctgttgtacctgtctttcctccagtgagtcttgctgaacctagagtgtgacctggtggagctaggtttctttctccttgggtgcgggtgggtattgaatgaaagagcagagatagaaagaggagttgtccatctgatttgctgctgaacagggctttctcttgattactgccttacaatagatcaatgggagtctgtagggtgccttttatatggcaggctattcaaaagatttggtctgatcttggctaggccttttccctagcagcaagtcccttggggaaatagtttgtgaatctccaatcttgagcagaactgactgctccctgaactgtaccgcagctggaatggactgtcacactgtggcttctatagttgggtataacttctgtctctctggccactccccatcatcagaaagctatatcagagttaaagtagtcttactttccccactgcttacagagtaccatgcctggtccagggccagtcttctcaatggatgtggaaatttgaactggtgaatgactctcatggcagcaggcatggggtggggtagacattcatatattcttagcattgtattagcctttttttgtccatagtccctgctgacttgttcccagatgggaaaagggcagagggtgtccagccatcagggcagagaaactgagagccgaggagctgccctgtgttgctatgacagtagaaatgagcctcatgacttgccttctgtaaactgaggagaggcctggccaatcctctcctgctgctgaaagtcgaggaatgtttttagaattcggttgctacacgcagtagccagagcagctcctgaggttctaaggctcacagtcctggagcagaggtgtgctctatataagctccacattagcacttacccatgcggttgtgtttgtgtaaaaaatactgctgcaataccaggagcctgtctgtccatcccctgcctttactagtaggacagctatccttttctacccttttgtgccccactcaatcgttcctttctcacctgctaaataaaccactgcccacttgggtacagacagccacaaggatgaccaaacccggcagggtgaaatagctggaaatggggaggcttattctttccgactctttctgatctctagcctgtctcctggccttctcaatattgttcttgcttatcccggaaccacttcagacattcaacaggaggagttcatcccgttctggttggagctttggatgaacatgtacattccttaaaagttcaggagttggaatatcaagtctgtgatatacagtatgagagacagctagacttccctcatgtcatgagaagctttcatgaatagctatcctgcccctttaaaatacagtgggttatctttgatgcctcttgattcgccccatcttttccttacggatacactcatttcccttcctgccctaagatactccccagaagcttactagataaagttacctggtcttgtgcttcctagtgtctagaaccatgagctaaaatgaatcccttttattaataagctatcataactaagggtgttatatagaaagtagaccaaagataccgatagcatatatgtgttgactctccccctttcccttttgggttcctccctagcgtctctttccatgtctgttattcttagttctttgcctgactgtgcccttcctggcctccattggctttaatgatagggcatctgtgggcttctgctttcctgcctatagacacaagccagcactactcattagccacaaggtacatgttgaaaggttgtttccggttgtcagttttcacagtagtaactgtggctcattgtactctccctgtgacagcaacgtcttttcaaaccacctccaatattggcccatttgtctattacggtttcttgtggtttcataccgaggttttagtacagtgcctttgacctagagtgtatttttagtgctaaaggcggagctcaatgaatgtcaaatcatgaaagcaaatgaagaggagggatttgtacatctagggggggggggaatgtgcctaattgtgtcttttctgatgacgtctgtctctgatgatgcccggtcacatgctttctttgtgatgaccatcgtgatgggttccgtagaggtgggagcagcagctaaagtcaagagcatttgtgagtatgactctagcagctggacacacagagaaatgtgcatcccagctataactaaatcaagaaaggcctggctgtggaattcacaggggtccttactggattcacaggctttgatataccttgaagaagtgacacttttttccccccttggctctcagcctttcttccaggctaattcatatttacttagatggctctagatattctctcactaacctgaacctttggcatcaacacaggcttaaaggacatacttagggtctctagtgtcaattgaatggcagcatcctgactttggtcttcaaagcaaagatgacactgaagtctgccccttccaaacaagggctaccctgcctgcttccagaagcaaagcacgccttaccatctgcttaggacttcacagttcataaagttctttccatcccgtctgctttctttttattgcacaagtgtttactttttattgctcagtatttactgagataccgcaggatgccactgtgcagggcgcctgcggtccttgaggaagagctgttgttcccatgcctaggcaattcagaaggccatggctggaatctgggggcaattgcatagcctgaaatcaggctgctagctgtagtggctttcccaagagaacacggggcttctgtttctggacctgtctgatgaggacaccctttcctgtctcctgccttcttctccagcagggttccccctcctttcctattcccccacgtcttctcatccccttcccgtctccacttaccccctcctaccagctcatttcttctgaagatgagccggattctttctacagtacttttgtgggatgtgaatctgactatgcagagctgggcctgggatttgtgtaacttcccttgagagcatagccttagctcttattctgttattcattatttgtaatgaatgcaggatgctccagtgccctccttgtcctcaactcttctgtgtcaagtcaggtgctatagcaggttgaggttctagctatatataagctactatctctatcattaaaatatttcaggttgttggtggcacatgcctttaatctcagcatttaggaggcagaggaaaaaggatctcttgagtttgagactagcctggctggtctacagagtgagtttcaggacagctacagccacacagaaaaaccttgtcttgggggttggggtggggaatctagatatattagtcaggattgtcttgaacgatagagccaatgtgcaatgaaagatagacatgtatctcaatatctgtgtctatatggagaaggatttatttttcataaggcattgacagagattatcatggagcttgtgaagttctgatggtctgctgtgtatacctggaaactagagaagctggctgtgtgcatagacagaattatgaaagagtgtctcagcgcaagtgcccaggcagagaaagaatgaacttgcttctcctgcttccttattcagctttctaggcatccttgagttctgatcctcagtgggctggatgatgttcacccatactgatgtaagctactcaccacactcactcactttccctcccttctctggaaacaccatcatcaatcctccttagaaatgtccttaactggttccctttgtagctcttggcccagccaaattgacacactgagtagacacaatgtatctaaccatcaattgagacactggggagacacaatgtattcaattgtctgaatcagctggctgacatccacctcaggccacaagctgaacgcacttagactgctgagggcacaaaagcactcctttccaatccaagttttgcaacaaggtagaccaaatcgagtcatcataagttattgtccttatctggctatgcccctgctttgatgtttacccaatacagaacccccactgattgatgatatttgcttcctcatcactacaacttggcctgtaatgagcactgctgtttttacagcatcaggctgctaggactatgtatagagagagagctttggctttgctctggtcttataccttgtgacccattgaacacctcactttcaagacctgatggggattcatctaggactctggtccttccttcagatgtgtgtatgttgtatcagtccctcagtcccttctcctgaatcctgctaggagacctcacagcacagtattctatctgctaaaggagttgctttccttcaatgatgctgtagtgatgctgctggaggagtagctggttctagtaatgttggtgttgaggaagataataataatactggggacattgcttttgaattaggggactagctcaagtatattatttttcatatctcatctcatctcatctcatctcatctcatctcatctcatctcatctcatctcatcttctttcctctccatacttatgttgcctattcaggaatattttggctattgtacctgtggatattcattacaaaggaggcagtggctcaaatgaagccaaagagcctggctctgaaggactgatggccaggtggccagacataggtattcaaaagaagatttgaggcttctgtttacctcttcgctgatggtgccactgctgaagtagtacttctttaccctggcagcattgtctcagtgacagctgtgtcttgtccacggggcctctgtgtcccatgctcttcacaagcttcatctccatcctctcaggcatgctgcccagaagggccctgggctcctcagttctgcacctactactttgcttcttcccattccgaggtggtgtatttgcctcagttgctgctcctcctatcccaccattccctttcttactctctctcaggtttaattcttgtcttgtcctttctcaccattctaagatagccctgtgacgcttcccttgatgagccctaatgagactctgtagcaccaatctctcctttcctgtagtcacacgagctggaatccagattccactttgtcatttggagactcagagtattgccacacacacccctcagcgccacccccccccccataactccctgcagcccccactttctccacggcacctactcccccttgcagcttgtgccgggaagccctgtttcctagctgcagcctattatgttccagtcgacaggccggggggggggggtgtcaccgacagcccccagagcctgctgcacatggtgttaagtaaggctttgggttttccatgacattggtcggtccccagggtgggcagggttcatgtgtctgcaggagtatgtgagggcatagactggaaatagccttgtcaaaatagaccaagggcaaatgctgagaggggaaatgaggctgacctggggcggagcatagggcaggtgcttctccaggggctttcctctgtgaggggccctgtagctaaaggctgcctgaaatacttcctgtgaccctctagacctacatgaggcccccatcagacacaagagcttcctgttccctcttcactttccaatacttacagagcaagaagggtttactcagttcttctttctttctcttgtcccctcagctcctgtcttagtgcatttggcctgctctaaggaagtgggactctaggctgtgtggctgtggaacaacaggggttgatttctcctggttctggaggctaggcatccccgactgtgtgccaccgacgtcattagtgtgtggcaagggcctgctttttgactcatggtcccctgtcttccaggtctaacctgggggatgaggtaaggctgcttgctggcatgtcttttctaaggatgcttattgtagttcctgggttctgttcgcatgacatttctcatcaccttggaggttagggattcaacataggaattttatgagggcataaacagcccataatagcctccttgaaatatctcttgagtgcactctccttcctcatcaggcatgtcaacaaaatttcatgtcactgtaaagcagaaataattgtactttctatagttcatattgtgacttgggcttcttcttcaatatgctcaaactgatgaccagttgcatgccaaactcacttttgccggtgtggtaaagtttgtctccatggcttcttacttagcttcagcctttctgtattccatgaagtgaggagattcattggtggtgtgtgtcaattagtttttttgctgctgtgataaaacaccatgacaaacttgtagccatcatccagagaagtcagggtaggaacctggaggtaggaactgatgcagaggccatcgaggagtgctgcttactcctcctggatcacacagcctgctttctcaacagtaggtaggaccaacagcctaggtggcaccacccacagtgagctgggccttccacatcaatcatcaatcaagaaaaatagcacaaaaccctttcccgaaggccaatctgctggaggcattttctcagttgagattccctcttcccaaatgactgcataaaacttgtgtcatgttgacatgaaactagccagcacagggtgtctgttagtttttcggggctactaaacaatctgaaacacgctagattgctcaaatcctctgggatgcattccggtagctgtggaggcagcaaagctgatatggtgatgcccctacaatccaggggatccatgggaagagcctgccctttttccatgggcttttaatgactactggacgctctaggcatttctcagcttgcaggacgcttctctagctgttctcccatggcttacttataggcttatatatttatatataggctcccatggcctatgcctataactttcttcttatatggatcagcttccatgtacgtatgtatctcaaatactatactgtgatagtgtctgtagaacccaggtccaagtcacatcttatttgcaagtactgcaggatacaatagggtatgagaatgaaatgttaactcgggatgagatacacaggtcatcccagctcttgggaagcaggagagggatgatcagaggttcaggactaccttcaattacattgtgagtttaaggctagcctgggctgccagagactttgcctcaacaactctacctttacgagagaaaagaaaaaacaagctctatggcttctctctctctctaagtaaagtatctttggttttatatttgcaatgatgtggacaatcatattgtcttagtgttctatgaagagatgtcatgaacaaggtattcttaagtttcagacgttagcccatgattatggtgacaccaaaaacaacaacaacaacaacaaaaacggacaaggttctggagaaggaactgagagtcttatattctgatctgcacgcagcagaagagggagatactgggtctgtcttgggcttttgaaacctcaaagcccacctccaatgaaacacccctacaataagaccacatctgctaatctaaatccccaagtagtggtattccctgaggactaagcatttgaatatgagcctacaggggccattttcattcaaagaagcatgcatatgtataaagaaaagcaaatacctgcatagatttggcacctgtcagagaagaggtaaattcaaagcagaaaaagcaacctaggctctggtctggtttatggagacactctgttttggcctccgctcattgcaatgacaaattattatccttggcttcagggtaaaattttctcagagttacggataccgagaagttcaaggacaaagtattaacagttcattttctggtgatggtgtctgcttcggtcatggatgtctgtcttcttttgtcatcacagtggggtcaagggttcagtgtgagagcatctaatgtttctcattctcctttaacaaagaaataaatatttatgttccatgtgtgcatgtgtgtcagggtgtatgggagcatatatgggggtcagaacacaacttgtaggacttggatttttccaactaccatgtagattcctggaaactcaggtcttcaggctagatagaccacaagctccatttcccagaaaaccgtctcaccagccccatccaatgtctcttcttatgggaaacttatgagttcagatctctgccaatgcatgaggtattatgtgttcttcctaacttctatcaatacctcttctccaatatagtctcatggaaatggtggaccagagctgataggatgcgcaagcacacgcacgcacgtgtgagcacacacacacacacacacacacacacacacacaccctcacttattagaatgacttataggttgtggtcctgtcttatgacagaaagtccaagaacccaatagttaggttacttagatactctcacactgccctcatgctcactggcaagttcatccgtcctggagctgaggcatccttcactgatattaaagcctacctcttcaggattccaacatacattgaatagttcagtagaccagcttgatcccttagttggtcttcggttgtaatcctgaagaagttaaaaaaaaaaaaaagtgccacttatttgttagagcatgggcttatagattcttgctacattggtcacaatccatgaataaaaccacattgttacccagatttttcttggtcattagtacaatcatgaagttggcttctatagcccatggcttgctctttcatcggtgttttgagctctgccttttattttggtccagtatcacagcatgctctgcctgcctgccccagctctggattaagccaagacttctgtgatattcttacattcccccaactaaataagaaataattctaagaccaacccaaattgagagacattctacctaatcacgcttctgaagacaaagaatgattgaggaatgagttcatactaaggaggctggggagatggctcagtcagtgaaatgcctttctcatatgcatgaagactgaagttcaatcccttgatcccatgtgaaaaggctgggtgtggtggcacacgtctgcagacccaatgatgtcaggatgggaggtggtagatccctagtatttttctagctggactagacttctatgagagaccctatctcaaccaaaatgaggggaggcatgttaggttgaagatgaaggatgctgtgttatcttcacatatgtagacacacagacttgttgctacatgcatatatccttcccacacacagaagagtaaccagggaccaaaacgtgatgacataggcttgaaatcctggcacttagaaggtcaaagcagagggattgccgtgggtttataagctaggctacatagactaggttatagtgcattatactggcttcaaactaaacaataaaaaaaataacaaaaccaaattaagggtcttatcagctaaatatagcttgtgacttgggtcagggcctgtatttgaaaaagtcattattggagaatttaaatgaagactcctaattagcaagtagaactaatttgcacataaaatttaataattgtacagtgataatagtataaataagataccaaaatttaaaaggccttaggctatataggagttctctgtacattttaacttattttcttatatttttggttgtgagcctagcctttaacggctgagccatctctccagcccttaacttattttctaagtatgacattgtttcagactgaaaaataaatagaaattacaaacacagtaagctctgtgtatgtttgcaggtatatgtatctttttcatccactgattgagaaagatagattgtagtactgtttgtctttttttttgttgttgttgttgttggctttttgttgttgttgttggtttttttgagacagggtttctctgtgtagccttggctgtcctggaactctctctgtagaccaggctggcctctaaactcagaaatcagcttgcctctgcctcccaaatgctgggattaaagacttgcgccaccacgcccagcagtactgtttgtcttgaattggcctctcttttatagaaatgaaacaggtccatatagcacatattcatgtttatctacacatggagaaattctaagaaaagcattcgtttcctcttaacacacatttctgggaagagtgcttggaaggtacgaggcaatttactttttgatatgttctaaaatgagcagtgcttggatttatggaaccatcagcatctgggttacatgtgtgtatacacatgtacgtatgtatgtatgtatgtacgtacccctctcttacccagatatgtttttctgtatacacttacagtacaaacatgcttactagagggattctcatatcttttggttccattgactatatcctcacatctgacccttcctcaggtatttttatacagaggcaatgggcaatccgtgctagttcagggatgccagctctttttctgtttctcagaagcctcacaattgttagactttacaaactttgttcctaactcggtatcatttcggtctcccccagagaagtgaataagctataatttgctgtgctaaggaactatgactcattccgggctttggatctcaagcccaaaaattagtgaatggttgtggttcaactcaggatttaaaaaagttattatgtttttaggtactctgtgtgtgtgtgtgtgtgtgtgtgtgcgtgtgcgtgtgcgtgtgtgcgtgcgtgtgcgtgtgcgtgtgtgtgcatgtgtgtatgtgtgtgtgtgtatgtgtgtgtgtgtgtgtgtgtgtgtgtgtgtgtttggggtgtgcaaacaggtagctgttcgtagcacagttgaagtggatgtcatttgtcatcatttctcaccttacaccctgtttttaaggtcaggtctctcctgttatttctgccactgagctgttatgcaaacttccattcttccgtttcagcctcaatctctccttgactgtgcttgggctaggactgcagaccagaatcattgcagaaagtctttaaaacacggggttgaactcaggttgtgcatcaaagcccttttacctccgagccacctcaccagttcgagcctctcaagatgtttaaagaccgtgacaccatgagactagagtttttgcaaaaatttgctttccttttgtgtgtgtggcaggttcttattggtagccctgactggcctaggatctgatgtgtatatcaaggtagccttgaacttgaagctctcctcagggagtccagcagtcactgtactatgtcttttaggtgagttcattttatagacaagctagttttataaagaaaggagtgtgagtagaagcaatgtctctggaatgaggggtttcttcaagctgtgaactattgcagagattgaccattgtaccctcctgctactatgtgacattctttcctttatagatgtgcttgacaaagacctcatgagcttcccgctttggatggtcattgagttaattaccgaaagagctctcgcctgttcttccaggtctttgcccctcttaggttcatgttcttctctagaatagtctctgccattcctctcagtgttccaggatgtctgtcacctgcacagttcctagttcacagttcctgtgaattctgtttcagctttctgggatcttccttgcatggtctctccagtgatcagactgtgaggagtgactctacaggtggttataatggtagctcaggaatttatgaatctagtacagactgtatttcaggaatgcacattcactgtgccattgcttcttccaatgagtctttgatgactggggctcactgtgggctgggccctaacgttcccagtagacttcactaggaagcagaaagtaagatggggcttcactcttctttcaagtattcacttgggtgtttaagttctcccagtagttgtttgcaaagtggcaaactctaactgacacactattatcccccagaattaatggcagtatgtccccagacattaccaatagatgtttgaactggctatacattcccagacattaccaatagatgtttgaactggctatacattcccaggcattaccaatagatgtgtgaaccaacatgaattcccgctgacactttctcacttgtgacattatcaagttattcatgaagtatatgtgggccactgtccagattaaaagcatgaaatagtagatatcctcttacttcagtaggagaaacacactggggacccaaacgtaagaaaagaattggagaaatcaactgttcaataaaaactagtgtttgtcccttcagtttggtaaatgacaagatattcaaagatttggagattagttgttattttacctttacatagcaaagtatctctatcctttattatattaacttcataaagagttgtctctatatgtcatgtgtcagacacagatgtcagaaaagaggatatacttatagctccctctttagtcccccacaacccctcagatgagttgcctctgtaggagaaatagtgagaaacagggaagctcattttattttaaagtcattaagaactcagttgctattaaatggacctctccctggagctctgtgatttttcaaaacttatttttgagaaaacagctgtacagcatgaggccttgggaagcacactacaaaatctccaaacatttggtaaatccagtggcagggccgatctaaacgtacgcttatgtggatgggaagcatgcagatctaaaggttattgggcaaactaccatccagtactatggtttctgtcatcagaccttgaagtgaccaaaggcagaggggcgatctttatcatgttgaagacggcatgccatttctctttgaattcaaatatgtgtgtgttatcctggtgagcatgctccaactcagtctttctaacttacaaggttttgacagtcaaagtagactctggcaagaaccctagtataataagacatgattttagaaaaatcatcactatttccaaggctgggcagcaaggatttcttttgactgctggatagattgacaggaattcaaaaagagactgtagttccactaagctaatgttctaagcacacgtggaagcaggggagatgtcattggacttactgttgacccagcttcccagtttgtgactactgtatgccttgtatgtcctggctcaaattggtgtatccatggcagggacttgagttgattatttttaccccgcagacagggtagtgctgacctcgaactctcaatccttttccccaagtgtctggattacaaatgtttgtctacacacccaaacaaattttaatgatacaagaattatccccgtggccattggagtccattgttaggacgctgttcctccaatgtatcgccacatatcaactctctatgatatgaaccaggagggctgttcaaattgcatctcttctcagttaatgccgggctggtctgcactgtatccctcccaagacttgtagccagataggactgcaaggcggcagcgggtttgttcattcggtttctgttttacaaactgaagttgacaacatccccggcacttgcgtggtgagtcatctgataaaggtcgccttggtcgctggttaccttctctactcaagaatagagtcacaggtggctttgatggctagtttccagaaccattgatggctcttcttaattaacgtgcaagtgggcctcctctgacatttagagagtcagtggttacctttcagaaagtactactgggtttcctctgggccaggcgccttgccttccacctgtggttttacaaggtattaccatggactgttctgagccacgcactgcacctaggccagagaggtgtgagggaagccgggctacagccacactgcctttcattagctcactggctctcatgtccaaagtagaaacaaggtccagctctgagagggttttgtctgccatgctgactctagaaacgtgctcaaaagagagatagaccacttctttgtccccctttctaccctgctttgttacgaaatgcagataatcattgccctttaagtacaagattgttcttaacattatccctggcttacacattgctggcacatactgaggtttccataattacctatgcacctaagcattcaagtgcgttgccttggagttaggatttctttctttcttgcttgcttttttttccccccattctgttttactggtatgactcattcactcatttgactccattcagtaaatgaatacatcctgagactctgttaaacactagagtccttccaatgagcagccctgtttaccctttcagacttctgggaaatgtggaggcgatgatcagtggagagccagctggtcctgaaaccttcaggaaagcatctgggcctgaaagcaatattacattgtattcgtaaggtgaaaagcgctatcttttccacccatgcctcccaaggctgagtgtactaccatctaaaccaacaggcttcatatacagaatgtgactaggttttctctaggaggttgtcttctttaagcaacatattaaagctcttgaacaagagccagacacgtggtacacacctgtaatcccagcacttgggaggcagaggcactcagagctctgagcttgaggccagtctggtctaaagagagaattctaggacagccagggctacatggtgagactctatttagaagaagaaaaatgttctttatcaagttcacattttagaatctttctgattggtgctgaatactgacccccctccacctgatttagaattgcccaagaagttcattattttgtgatatcctcagactctcattagtgctagaagatgactaatttgaagtggggaagtgttttctgaagtgtccctctctgcaactctgcccttaatgtcaaatcaagcagttatttctgataagttctttagcttctctgaagcagcccagctatggctggttgtgggtggcgctgataatgactgaacagacaacacaaatgaggtggggttggccttttcagccattttacaggaatgagggggttgggtagtggctccattagtaaaacgcttgctttactgtgtaagcaactaagggctgggaggtggaactcttaaaggcttgctggccagccagtttaatcaaaccaatgaactctagattcaatgagagactctatcgtaataagtaagacagaaagaaattgagaaaccacccgatagtaacctggggcctccccaaacacaggagcacatgtcatacacacacatgaacacatacaccgcaaactgaaaaaaggatccatttttctttaatactcaatgcaataagaaagctttgagaatgtttagagatttctatgaccactgaaaatatagttctagaaagacagagatgaccaagagagacaggaacctgggcagtacagctgctatttgaatgctttgttcttctcagggtattttgccctgaatgttctttctggattttgagcacttgagctcttggcatgccagcagttgggccttctggaaagatcatagactctgaaaactgtctaagaatctgatagccatcaatacatttccagcaacattcccttgttataattaattgaccatgtgagtttcagtcttcaaatccaatgaagaaagggaagagtggagtgtttagttagaatgactgtagatgctataacaagcaaaccttaatatttaacttaaaatagcctctttttttacataatagcccagacagggtgtagctagtgagtagatggctgcttttcatgaagcaatttggaagccatacctctttctatcaccatctcgctatcccaaggaccaaatggctagtagaagagggctacccagttactttcagaaaacttctaaaagactaatatattaagaagcacagatttaagggtgtgtcacacagtgcataaatacacataaacacagtataatgtgtcaatctgggaaatacttctatctctaaaatcatgtattatttctttttaattttccatttattttgtgtgttatgtgcatgtgtttgtatgcatgtgtgtatgccactaggcatgtgggtatccaagtcaggttgtcaggcttggtggcatctttactcaatgagctatctcaatgatctcatttatcattttattatggaataagcattcaaaatatttttctagcatttggaaatacacagcataatgttactattattgctgttttattgttattatctgtactataccatggcaaagagaaatgtttacttcttctaactatagtctggtacccactgcccagccactttctcttttcctccctactccatcctccagtgtggcattattctctgaatatctgagatcaacctttccaattctgcctatgagtgatgctcctgtggcacttggctctgtgtgcctgggtctgtcacctgtcataatgaccgaagtcttctactttcatccacattgtcaccaaaagcaggcttacagttttgtgggattttctgttgttatggttgaatagtatcacattgagcatgcctgccacaatttcttcattgtgtgatggacacgtaggcttttcaatctctggctaatgtaaatatagcactgcaataaacatgggaaagcagatgtatgttccacatgctgcttgcatttcctttggacacatacccagtagtaagactattggaacatacagtctttctatttttagtattttgagaagcctccaatctgttttccataatgtctgtgctagtttacattcctaccaacattgtgcagggacagaatcttttcctgaacactcttgccagactttatcatttggttttctgacaataattattagaataaggtcaaatcatttcactgtgcctttgatttaaatttcctggtgtttagtgatagtgaaagttttttggtgtactgttgggggcaaattgtgtgtttccttgggcaaagtattgatttcttaatgtaattataaattggggtattttatcatctgccactgtgctttgatattctttatatattgtggtcctctcccccattatcagatgtatagtttgtaaacattttatagaattttgtaagcattttatagaataactctttattctgatggtagtctcctttgtgtttttggtttgacataatcttgtttgtccatatttgattcttctttttgtggactattttggtgattgtacaaaaaccatctttgtttagtataataacttctcttaaatcttatggttttatggcttatgtttaagtctttaatccattttgaaattatttttgtaacttgtaagagacaagagatagaagtatagttttattccctgcctaacaactttcctatttattgagaatgttgtctattggcctttgtcaatgagtgagaaatctttactcttacaccactgttaagaaccagttgactggtcagcaatggtggtacctccctgtaatctcaatacttagggaggctgagacaaggagaattgtcatgagtttcaggccagcttgggctatatagtaagtatgatagcagcagaatgagatttggtatccaaccaaccaaccaaccaaccaaccaaccaaaaaaaccaaataaccaaccaaccaaccaaccaggcaaccaatcaaccaaccaatcaaccaactaaacaactaaataaccaactaatcaaccaagcaattaaccaactaaccaagtaattaaccaaccaaccaaaacccaagaaataaccagctaaccaaccaaccaaccaaccaaccaactaactagccaacaaactaactaactaactaaccaagcaagcaagcaaacaagcaagcaagcaagcaagcaaccaaccaaccaaccaaagaaacagaaatcaacagactgaagatgtgtagatttactcgtaggtcacttttcctttttcttgatttacatgtctgttcttgtacccctcttgtaatattttcattgttacagcttataaatgactgaattcaaagatattgcctcctatgtgctttatgttcaggttggttttgacttttttttttttttgagattttttttttctttctgtttccatacaaattttaggattgttttcaatttctgtgaagaatactaccaagatatgatagggaatggattcagtctgtagattggattaacttttcagcaatgttgattcttctcacttatcaacttgagatgtctatctctctctttgggtgcacccatttatgtgtgcctgtgtgtgtttgtatgtgtgtgttgttgttgtttccttgtttctttcatttttgtttatttgctattgtaagatggattgctttttatatatttacttcatgtagtttgctataggtatgtaacaaagctttgtatattaatattgcatcctgcagctttcttactttgttgcatttttattgcagttttgggggttttctatgtatacactcatagccactttttaaatactttaccttggaagtggcatat

SEQ ID NO: 1052 - DNA, 6564 bp, Mus musculus
ccggtcacatgctttctttgtgatgaccatcgtgatgggttccgtagaggtgggagcagcagctaaagtcaagagcatttgtgagtatgactctagcagctggacacacagagaaatgtgcatcccagctataactaaatcaagaaaggcctggctgtggaattcacaggggtccttactggattcacaggctttgatataccttgaagaagtgacacttttttccccccttggctctcagcctttcttccaggctaattcatatttacttagatggctctagatattctctcactaacctgaacctttggcatcaacacaggcttaaaggacatacttagggtctctagtgtcaattgaatggcagcatcctgactttggtcttcaaagcaaagatgacactgaagtctgccccttccaaacaagggctaccctgcctgcttccagaagcaaagcacgccttaccatctgcttaggacttcacagttcataaagttctttccatcccgtctgctttctttttattgcacaagtgtttactttttattgctcagtatttactgagataccgcaggatgccactgtgcagggcgcctgcggtccttgaggaagagctgttgttcccatgcctaggcaattcagaaggccatggctggaatctgggggcaattgcatagcctgaaatcaggctgctagctgtagtggctttcccaagagaacacggggcttctgtttctggacctgtctgatgaggacaccctttcctgtctcctgccttcttctccagcagggttccccctcctttcctattcccccacgtcttctcatccccttcccgtctccacttaccccctcctaccagctcatttcttctgaagatgagccggattctttctacagtacttttgtgggatgtgaatctgactatgcagagctgggcctgggatttgtgtaacttcccttgagagcatagccttagctcttattctgttattcattatttgtaatgaatgcaggatgctccagtgccctccttgtcctcaactcttctgtgtcaagtcaggtgctatagcaggttgaggttctagctatatataagctactatctctatcattaaaatatttcaggttgttggtggcacatgcctttaatctcagcatttaggaggcagaggaaaaaggatctcttgagtttgagactagcctggctggtctacagagtgagtttcaggacagctacagccacacagaaaaaccttgtcttgggggttggggtggggaatctagatatattagtcaggattgtcttgaacgatagagccaatgtgcaatgaaagatagacatgtatctcaatatctgtgtctatatggagaaggatttatttttcataaggcattgacagagattatcatggagcttgtgaagttctgatggtctgctgtgtatacctggaaactagagaagctggctgtgtgcatagacagaattatgaaagagtgtctcagcgcaagtgcccaggcagagaaagaatgaacttgcttctcctgcttccttattcagctttctaggcatccttgagttctgatcctcagtgggctggatgatgttcacccatactgatgtaagctactcaccacactcactcactttccctcccttctctggaaacaccatcatcaatcctccttagaaatgtccttaactggttccctttgtagctcttggcccagccaaattgacacactgagtagacacaatgtatctaaccatcaattgagacactggggagacacaatgtattcaattgtctgaatcagctggctgacatccacctcaggccacaagctgaacgcacttagactgctgagggcacaaaagcactcctttccaatccaagttttgcaacaaggtagaccaaatcgagtcatcataagttattgtccttatctggctatgcccctgctttgatgtttacccaatacagaacccccactgattgatgatatttgcttcctcatcactacaacttggcctgtaatgagcactgctgtttttacagcatcaggctgctaggactatgtatagagagagagctttggctttgctctggtcttataccttgtgacccattgaacacctcactttcaagacctgatggggattcatctaggactctggtccttccttcagatgtgtgtatgttgtatcagtccctcagtcccttctcctgaatcctgctaggagacctcacagcacagtattctatctgctaaaggagttgctttccttcaatgatgctgtagtgatgctgctggaggagtagctggttctagtaatgttggtgttgaggaagataataataatactggggacattgcttttgaattaggggactagctcaagtatattatttttcatatctcatctcatctcatctcatctcatctcatctcatctcatctcatctcatctcatcttctttcctctccatacttatgttgcctattcaggaatattttggctattgtacctgtggatattcattacaaaggaggcagtggctcaaatgaagccaaagagcctggctctgaaggactgatggccaggtggccagacataggtattcaaaagaagatttgaggcttctgtttacctcttcgctgatggtgccactgctgaagtagtacttctttaccctggcagcattgtctcagtgacagctgtgtcttgtccacggggcctctgtgtcccatgctcttcacaagcttcatctccatcctctcaggcatgctgcccagaagggccctgggctcctcagttctgcacctactactttgcttcttcccattccgaggtggtgtatttgcctcagttgctgctcctcctatcccaccattccctttcttactctctctcaggtttaattcttgtcttgtcctttctcaccattctaagatagccctgtgacgcttcccttgatgagccctaatgagactctgtagcaccaatctctcctttcctgtagtcacacgagctggaatccagattccactttgtcatttggagactcagagtattgccacacacacccctcagcgccacccccccccccataactccctgcagcccccactttctccacggcacctactcccccttgcagcttgtgccgggaagccctgtttcctagctgcagcctattatgttccagtcgacaggccggggggggggggtgtcaccgacagcccccagagcctgctgcacatggtgttaagtaaggctttgggttttccatgacattggtcggtccccagggtgggcagggttcatgtgtctgcaggagtatgtgagggcatagactggaaatagccttgtcaaaatagaccaagggcaaatgctgagaggggaaatgaggctgacctggggcggagcatagggcaggtgcttctccaggggctttcctctgtgaggggccctgtagctaaaggctgcctgaaatacttcctgtgaccctctagacctacatgaggcccccatcagacacaagagcttcctgttccctcttcactttccaatacttacagagcaagaagggtttactcagttcttctttctttctcttgtcccctcagctcctgtcttagtgcatttggcctgctctaaggaagtgggactctaggctgtgtggctgtggaacaacaggggttgatttctcctggttctggaggctaggcatccccgactgtgtgccaccgacgtcattagtgtgtggcaagggcctgctttttgactcatggtcccctgtcttccaggtctaacctgggggatgaggtaaggctgcttgctggcatgtcttttctaaggatgcttattgtagttcctgggttctgttcgcatgacatttctcatcaccttggaggttagggattcaacataggaattttatgagggcataaacagcccataatagcctccttgaaatatctcttgagtgcactctccttcctcatcaggcatgtcaacaaaatttcatgtcactgtaaagcagaaataattgtactttctatagttcatattgtgacttgggcttcttcttcaatatgctcaaactgatgaccagttgcatgccaaactcacttttgccggtgtggtaaagtttgtctccatggcttcttacttagcttcagcctttctgtattccatgaagtgaggagattcattggtggtgtgtgtcaattagtttttttgctgctgtgataaaacaccatgacaaacttgtagccatcatccagagaagtcagggtaggaacctggaggtaggaactgatgcagaggccatcgaggagtgctgcttactcctcctggatcacacagcctgctttctcaacagtaggtaggaccaacagcctaggtggcaccacccacagtgagctgggccttccacatcaatcatcaatcaagaaaaatagcacaaaaccctttcccgaaggccaatctgctggaggcattttctcagttgagattccctcttcccaaatgactgcataaaacttgtgtcatgttgacatgaaactagccagcacagggtgtctgttagtttttcggggctactaaacaatctgaaacacgctagattgctcaaatcctctgggatgcattccggtagctgtggaggcagcaaagctgatatggtgatgcccctacaatccaggggatccatgggaagagcctgccctttttccatgggcttttaatgactactggacgctctaggcatttctcagcttgcaggacgcttctctagctgttctcccatggcttacttataggcttatatatttatatataggctcccatggcctatgcctataactttcttcttatatggatcagcttccatgtacgtatgtatctcaaatactatactgtgatagtgtctgtagaacccaggtccaagtcacatcttatttgcaagtactgcaggatacaatagggtatgagaatgaaatgttaactcgggatgagatacacaggtcatcccagctcttgggaagcaggagagggatgatcagaggttcaggactaccttcaattacattgtgagtttaaggctagcctgggctgccagagactttgcctcaacaactctacctttacgagagaaaagaaaaaacaagctctatggcttctctctctctctaagtaaagtatctttggttttatatttgcaatgatgtggacaatcatattgtcttagtgttctatgaagagatgtcatgaacaaggtattcttaagtttcagacgttagcccatgattatggtgacaccaaaaacaacaacaacaacaacaaaaacggacaaggttctggagaaggaactgagagtcttatattctgatctgcacgcagcagaagagggagatactgggtctgtcttgggcttttgaaacctcaaagcccacctccaatgaaacacccctacaataagaccacatctgctaatctaaatccccaagtagtggtattccctgaggactaagcatttgaatatgagcctacaggggccattttcattcaaagaagcatgcatatgtataaagaaaagcaaatacctgcatagatttggcacctgtcagagaagaggtaaattcaaagcagaaaaagcaacctaggctctggtctggtttatggagacactctgttttggcctccgctcattgcaatgacaaattattatccttggcttcagggtaaaattttctcagagttacggataccgagaagttcaaggacaaagtattaacagttcattttctggtgatggtgtctgcttcggtcatggatgtctgtcttcttttgtcatcacagtggggtcaagggttcagtgtgagagcatctaatgtttctcattctcctttaacaaagaaataaatatttatgttccatgtgtgcatgtgtgtcagggtgtatgggagcatatatgggggtcagaacacaacttgtaggacttggatttttccaactaccatgtagattcctggaaactcaggtcttcaggctagatagaccacaagctccatttcccagaaaaccgtctcaccagccccatccaatgtctcttcttatgggaaacttatgagttcagatctctgccaatgcatgaggtattatgtgttcttcctaacttctatcaatacctcttctccaatatagtctcatggaaatggtggaccagagctgataggatgcgcaagcacacgcacgcacgtgtgagcacacacacacacacacacacacacacacacacaccctcacttattagaatgacttataggttgtggtcctgtcttatgacagaaagtccaagaacccaatagttaggttacttagatactctcacactgccctcatgctcactggcaagttcatccgtcctggagctgaggcatccttcactgatattaaagcctacctcttcaggattccaacatacattgaatagttcagtagaccagcttgatcccttagttggtcttcggttgtaatcctgaagaagttaaaaa

SEQ ID NO: 1053 - protein, 112 aa, Mus musculus
VFKRRFEASVYLFADGATAEVVLLYPGSIVSVTAVSCPRGLCVPCSSQASSPSSQACCPEGPWAPQFCTYYFASSHSEVVYLPQLLLLLSHHSLSYSLSGLILVLSFLTILR

SEQ ID NO: 1054 - DNA, 76580 bp, Mus musculus
  misc_feature (1)...(76580): n = A, C, G or T/U
gtgagagctttctcacttgtgagggcattctgggttgtgtgcgagcctactagccacgatcagggctgttggtcctctttccctgtgttcccacactttccctgtgctgcgacttccctccccatgtcctgttccaaactccttttccctggggtcctggtcacctctcccaatgagagttggtgcatcccagaggcttacaacacccttgtgctcttggagtctcccagtagctaccgtatcctcaaacttggccaccctgtccccagatctgtctgggacttctcacccaaatcaaagtctgtgtgataatttatgcaaatgagggagggctggtggtggccagagtcacagacatccatcaccccatgtcccagcacagtcatccttcatcaggcccttaaaagatagtacagtttttgtttaaggcaattacttaatcttgacaaactcctgtgttaagcagggctattaatggggcccaccattaatcagtgcgaacccaggtgggtgctttctctgaacctccatcactcttggggacccaaggtgggccctttgccatcctcaatgccctaattacacaaacagcatgctaaccacaagcatcccacgtggacggcaggggcacccagccatggacaggaaagaggcccatttttaatgccaggcagaaggttttctgagccaagcaggatgatccatggaggttattagtagggaccaggagcacagctggggagaacagataactcctctcctgagaaactctcctgctcttagcacccactttgtcgcctacctggcggtctgcagaaggattgcacaagtaccttacgttggccagttacgtttacgtttggatgactaggaaggagtttggaagtaccaagccttgccctgtgtctgtttggcatcatcatctctgacaccccataaaggagctgggtatcagagtgctcctcttcatccaactaccacatgtggccctgtcacactgacacctgcccaatggtgtcagaggggagctggccccacaggagaacccgtagtgagtggaatagagacagagcccagaacctggatctccctcaaggagttcatttctgtttggatcagagcagaacaaaacatagaactacttaggaaagacgggggttcatttcagcttgccaattacaagttacagtctatcgttgtagggaagtggaggcaggaactgcaaatagctggtcacacccacagttaagagcagaaataaatatgtacttgcttgcttgtgtgctggtagatttcttcactcttataccattcaaagccatctgcctaaggaatgatgctgcccacaggccaacccaatgttggcatctctcattgagactcttcccaggtggttttaggttgtaccaagatgacaaagctaaccatcacaacggtcaccgaagaaatgtcactatcttatcccaccagtgaggatggaccagaatcagtgtgggtgggtgcgaggccagactgtgacactaattatgcattactaggggcaagtcaccatgtttctccatgcctctgtttccccttctgtaaaatggggtagaagataacagattccttcttgagggcttcaggtatcaatatgttaagaatgggacacactcaggagagtccttcctgtgacagtctcgctgtcagaagccctctgtgagggaagtacagttctgatcactcctccaacccccaggccaagtgtgtggggagtttttccctggatgttgagccctgtttattttataggaagtcagcttcatctgcttttaattcacacacttagctcatcaaaatgttgttttgcaagaggccttttggtgtccaggaagcctttggaatggcccctctttacatagtcttattccaggaaaaagattctagaaaccactttgtttgataggttgactcatgccctaatgtttttctttttcttcttcttttttttgatcacacttatttatttgtatgtgtctatgagaacataacgagtttgtgtgtgtcacgggtcacatatggaggtcagaggacaatttgtggaagttggttctcaccctgagccgtgtgagttctggggatgaaactcaggtcatcgagcttggccacacatcccattacctacagtcagctttccacatcttagtttcttcatgcagggacgaaggatttgtggaacagcctttagagttgctggtagaccccacatcatcctgctcaagggagccaccatttctgtcggtggcggtgtgagtgggtaagaagaaacatgggacagctccgtggaaacaggacatactagaagtgtccttcaattcatagtgtggcacagacgggagtcaagctccaacacatgtcccccggcttggcggtgcagctgcacacccctgctcccttccggctcagaatcccctttctgacttagcatcctgaggaccctcttattcatcagaaggcttcgggatgggtccacgtacccattgactatttttgtgcacacccccagcttgccggaaagacagcaggtgatgatccaggtcaggctggaggcaggctgcactgaccagcacagctctgacccagccaaggggataggaagttataaggagtgtcacaacatcactcggtgacctcacagggacctgggtgaccctgtgagttcagtgaactggaagatgggaggaaggaaggaaagatatcataactgtttgctgtgtttgttaagtggcataacttaactaagctaagatgtggaagaggggaaggactgaggggtgggcgattctcatttccgtgttttatgtgtcaggaagcctatgattagcctaggctagagctccatcagtgtgcaaagacggtgacaatgactacttagtccagagctgttggacatgacagccacagctgcctgtcgccatgcagttgagcaatcgtcccagtaagctgcacaaaagggaaggatctacaccagattttgaagacttcatggaacaaagaacacaaaatgttttattaacagtttttatactgcgtccatgctgaagttttaattatgtgtatatatgtgtgcttgttcatatgtgtgtgagtacatgtacgtgtaggcatgtgaactcatctgtctggaggtcagaagacagtcttgggtatgggtcctcaggatctgtccatggttttgtcttgtttgcttttgcttttgcttttgtttgtttgtttgtttgtttgtttgtttgtttttacagtttctcattgatgagcctgggttgtctggtcagctagtgagctccaggtgtctccctgtctccttctctcagcctcctcccatgggagctgagcatcgattgcaaacactgtggcccatagggacctgatagtggagtgtcacagatgtccctctgaaaggagccagtacctctgagactctgaccacacagcctggaagctgccagatggtggggtggcaggggagtcagtcagaggggcaagggaacctatcaaaagaaaacacggtttggggacctcatcttccccaaggtagttcatctagctccatccctacaatgggtgcaaggagcatgggggcccaggtactaattgctggctgctcttatcgccaagtccatgaacttggcctagatttgttcttttcccttccctccttctctttctccctccttatatgtgtgtgtgtatgtgtgttctcttcatgtgcatctgtgtatgcccatgttgtatgcatgtatgtagaagtcagaggacaccttcaagtgtcatttctcaggagctgtgtctgtcttccattttggaagacaaggtctttcactagcttggaattcaccagctgggctagactggcaggtcagcaagccctgggcatctgcctgactttgcctccccagctacaggattccaaacacaccactgtgcctggcttttcttatgtgggttctattctacggatcaaactctggtccttgtgtttataaaataggcacttcagcaacagggcccctagattcacactttttgcaagatctccgagtccctagaactaaaatcctctgtgtttcaaatcctttgattgttttgggggccatcccacaactttctagaaaacagattttgtgacctagacgattgccccctttagtctggattgaccttcctaatgtttcttctgaccctaagatcccctaacctggggctgaggagacaggtctattggcaaagagctggtccactagaactggtgagcagcccctgctgttccccacagtgggtagtgggggcttccttgggatcctgtaaaactcccctctgcgtccccacccctgctgaagagaagggagcccagcagagctggcagtagagacagccacactggttctcctgctctctgtattgtctcacacactctgtgtcccttggccctgtcactgccctcatttcacagatgggaaaactgaggcacagaataactcattgagacagccacttcagcactacctgtcacatcccaagcctctggggtggtcccagtctgtccctgtggcctgtcccatgttattccaggtacatcatttaaagggacagattgcctggcccagtctccccgaggcttcagttggcctcttccatggcgttttctggaatactcttggagtgttcttttctcttctctcttgccttcccaaccctgagctcagtctcagggcgctgtccatacggagtggctcacactggctccagcccagccctgtgcactcttccaacaactgttttgtcagtagttccttgactgggataggccaggggaaggtccagctgctctttcagcctgctagacaacagtcagcttatgctgtttgaatgttgggcctgattttaagccccgcctccaactgagactgtaacacttctcaatcacatgttgtgaagtaaccactctggatatcatagttattaaaaagcatccttgtgaggcagtcgctcccacaggggcctccaaagtcagcttgtcctgcggctggttactggaaacacatgccatttgtgcagggccctgaagacaggcaggctcagtctggaggactgaggtgttttggcttctaggctgttttagtgccagctactctagctctgaggcacgggcatcgggcacttggtttcctgactccacctgactgacaggctagtcttggaagatgtcccagctcccaagtgggctgaggacaagcccagctcagtgagggctccctagctctggtccactccttcatctttacaccagtggaaagtcagctttacatcagtggaaaggctaggtgacctaataattccaagagcacctgtttagacatcttgcacgttcccttgttctgtgtgtcctgtataccggaagctcatgtggagtagccaggctgggcttcctggggattgtacctggggatgtgatgagaagccatcagaatctatttgtcaaagcccttttctacaaagctgtgactcctgtcctttgcgtctgggtttgttttttgtttgtttgtttgtttgtttgtttgtttgaagacactgcctcattaacctggttgattgattcatctagactggctggatactggctggatagtagagccgcaggaatccacagaactctgaacttcagccagctgctcatccttggcctggtcaccctgaaggttgcacttatatatgcttgagccttagcacaacaccctgttgtctaacttaattttcttgtggctgggacaaaatactgacgagtgaaaatgacctaagtaatcttccaaggaaggaaggacctggttcacgcccgtcatggtgggagggcacagatgcaggaagtctggtcattttgcttctgtacttggaaagcagaaagaggtgaattctgacactcagcttgccttctctgtattcattcagaactccaacctacctgtggtgtttaaatgagatgtcatcccccctcccccacaactcctgcatagtttgagcatttgagtacttggtccccagttggtggttcagggcaatttgggagtttggggaaggtgtggccttgttaggagaatcatgtcacaggaagtgaagattaaagactcacaccagttggagtttgctctccctactttgtgttttctgttttaagatgtgagccctcagcttctgctccagctgtggtgcatgccacctgctgccatgtctcactatcacaataacctattcctatggaactggaaaccaaaccaacccttccttcaatagatggtattgctcatagtgtctatcatagcaacagaaaagaaactaatacaccattctacactcagggcgggtcttccccgctcagtaaacctttccagaaacaccttggtacactcaggagtatattccatggtggctataaatcccatcccattggcaattaaattaacagcaaccagcacaccacctgcactgtacaaaatctcttgtcctggagtcgcttgtccccgctggctattgttaaatacctgggcagcagggcttctcaaagaaagccacttctctggtcccactcacaaaggacacatgtcctccaagctgattccatcttgtagttataattgaaaaggcgggaagctctagagaaccacattctccagagactggacatcctagaaggctgtggtgtctccacaatgtcccatatgagggtcatgaccactgagaagtctgttgagcacctctctaggcagtgtctaggatatggccacatctcagaacactctgtcagctgatgtgacttcgagacatgttttcatgacccggatgttctgcattcttcctgtaagaagccctcttcattcgccactgtggtcatgatggggctttaacttgagctcagcctccaaggaaagcccgtcccttatctcctttcaacgtcttcctcacacacagcaaaatggttacctcaggaccctgtcacacaaatggctcctcaccagaccctaccagccagggaacatttggggtttcagttagcacacaaaaattctggacttttcatgacatctccctcctcttcacttcctcagggactttctgtgcaagatcaaaaacaaatgtgcaaaatgtgcatttttctagggacagggcgtggttgccaagccttctccactttgagcttctccctcagaaacttaaaaagggagacatttctttgaaatggcatatggtgtgtgtgtgtgtgtgtgtgtgtgtgtgtgtgccctttctgctggaggacatgatttaatttagatttccttaaaaaaataataaaacccacaatgaaaacattgtgtggaatgatcaaattcaatatgtcggctgaggtggctgtttttgtatgtgggtctgagtgtgtgtgagaagtatatatgggtaaagaggtgtgtgtgtgtgtgtgtgtatgtctggtgcacttgcgtgtgtgcgcgcgggtgcacatgcagtcgtaaagaccagagcagggcatcgctgtcttcctttatcacttgccttattcctctgggcagggtttcccactgaatctggagctaggttggcagctagcaggccctcagtgactttctgtgcttgtccagctgtgtgcataggtgccggggattagaactcagctcctcgtgcacacacagcaagcgcacttacccactgagctgtctactagccaaaggtagctcttgcttgctctgtttctctttgcattcttcagctgctgctggggcctctgtatgggaggttatttctctcagaagctaaaatctcctcactgagagctttgagcaagcacttatttctgggagcccctactgagctgaaatgtctgacttcagatgagctggttccagcctgcatcccttcacttacctgtatgaaaacttggtctgggatgattgtgtggtgaatctgtgagtgggagagtgagtgggagtgagtgagtgtgtgctatcctgttacagcgggactcccgtcactgggctgaatggttcagcagcttagtataggttgtgctcctgcaggggacctgagttcagctctcatatcgtgcagctcacaactgcctgatgtggctccagctctggggcatctgatgtctatttctagtttctaaggtcccagaactttttattttttaaagctggggttgggggactttttttagaaaagattttttttttaaagcttgcaagtggctcagtcggtaagaacactgccttctttagcagaggacatacaaatgcagcatacgttcacacatgcacacacacacacacacacacacacacacacacacacacacatacacatgtatggaggccagaggctatttctgctcattcttcaagtgccgcctgccttgttttttgagacatggtctttcactaggacctgattcccaacaatcgctttaagctgtctggtcagaaagctgcagggatcctcctgcctccacctcctcacgtctgggtttatgagtgtgcaccaccttgactgtcttttcatgtgggttctgggctttgaatttgagtccactaagctatctccgcagccccggctctccactcttgatattaactaccagccctttggtgctggtggtgcctccagaactgaaaacaccaacacgtgtgtgtcagttcggagctgagtcagcccctgtctgtgcttggcctgtgctcaacaaatcatcatggtaattgcaggatgctctttgcttattgaaagaaaatgcctgggtgccccagaggcaaacataattataggctttaggaaaacagggccttttaacaagtaggctgggaaaaggctaagggctggggcattcctcattcctctgtggactcttcccttagtcagaaggccactggcctagggaagtagggcctagtctatctgcctcgtctgccatatcatcagggctgctgacagcttaggtgtgccttgatcaattcaccgaaataaggctattctttgtaaacagaaacttctcttctatggcactgtggtgaaatagttaaatttaccatggttgggggctggggtggtagtaactcttgctgcacaagcatgagagccaagtcaccaccataaatgtcagaagcctggtgtggggacacgtgccttctaccccggcattgggaaggcagagacaggaggatcactgggacttgctagccagccagcctagctgaatcagagactgtgaaatcccagtgagagatcctgccttataaaacagtgtggctagttggatagtacctgaagatgaacacctgaggttgtcctatggtcttcacatgcttgtgaacatatgtgcacacataccacacatgggtgctcatgcacacatgtgtactcaagcacacgcatgcacgcacacacctgtgcaggcatgcatgcaggcatgcgcacacatacacatagagcagggaattagctacctaagcagattcccccaagctgcgcctggccttgcttcacagatggttctaggtaaatatgtgcagcctgtgtgcacagcggatctgaggctggtacctgatgatactgaagccacacgcagccaagccggggtgggcagaagcttgtgccagtcagagtctgtcagcactgtcagccctgatttgcggccaagctgggttccccaagttcaaagagcatggagctgcttgtctttgtcaagagcacggctggggatcttttatgtggaagatgtaggattctcagactggctttgattatttattcatcccccttcgtgggtgtgtgatagcacaggcatcatggagccccttgtcctggccactcttgctcaggaattcacggagcttaaagccttttgaaaattgtttttccagggagggggaaagtgtttgaagtcctctctctctctctctctccctccctctccacagttcctcagcagctcctgccggctttccacgcgcctttgccgattgacatgagacaccaggagggaaggtaccattatgaccctcactctgtccacagtgtacacgggtaagtgttggcttccatacactgctcctgctgtgcagctgcctgcctctgtccttttaggtcacaaaagtgctgtgactgtgaacccatgagcaggtgacagtgcacactagccccaagtagcaggcttggatcatgtgtcatcaccatggttcaccgtggtccacagctctaggcttccttattggtccctacaatgtaatcttaagtacgggttgccctggggtagtggtttggagtcccctccccgcttttacaactagctcagagtgagcctttaggtctctttctgcttcccaccttgaggtccccaaggagaacggtgacaccttgatatgattcagcatttcccggggtgggggtgggnnnnnnnnnnnnnnnnnnnnnnnnnnnnnnnctggctgatgttcattctcttggcatttgctcctttctgagccccgccccctcctataccacctggtcccctccagaggagagaccagttattttcatcattgcaatgataaagtagctgaccaaagcaacaaaggaaggaacgtttattttggttcatggtttgagggtccattgtggtgaagtcatgacagctgatcacatggcatccacattcagggcgctgagagagatggatgctcggttgccccacctctctttctctttcagtgtgggaccccagcccaggtaatagtgccacccacagctagggtagttcttccccagataacctaatctagtaagcacttacagggatataatatgtctcctatgaggttctagattgtcagattgaatgacagaattaaccatcacagaggtctgggccgtggctgttcattcagccctccatgcatgggaagtgagtccctctgtctgtccgcttcccctcccactcttctcagacctcctcacctgtccacatcaaattgctgtctgcggtgctgaatcatagtccccgtcacttgtcgggatgactggcacctgttgcctgcccagtctgaaccccctcagcttcagatctagctcccgaggagaatgggatgccccaccctgagtgggacccagctctcaattccaacaccattgccagatcagagcaagggcacataactctgagatttccttaggctgctgtacctacagtgacagatgcatagtaggtacgcagagagtgctgagcagagagtccccacctatgagattctaactcccactagaataaaattagtcagcatagctgagtgcccagatgttcaaagcattgtgcctctgctgtgtgccagccagctgtccagtgacacctgtttcaggacacctcctgcctactagacagccagcctgggactttggctttcttttaagacaaattttaagtttaacattgggataatgacaagatggttccgtgagtaaaagtgtttgcagtgcaaacctggtagcctgaggtcaatccctagaaccctgtataaaagtagaagaaaagcaacccccaaagttgtcctctgatctccacatgtgtctcatggcacacataacaccaatatgcaaaggtaatacacaaggtgcatacacaataaccttcaaataaattaattaaattttgaaataaattcaggcatgcaagagctataataattgagcaagataaaccacatgccctccacccagctattcagacattaacatcctgtatcatctagtaccaatatagtgaactaatccacatatctgatattaatgtggatagttttctcataagcctttatttccttgttcaggatcctgtgtgtttgcatgtgtgtgtgtgtgtgtgtgtgtgtgtgtgtgtgtgtgtgtaagccagaggaggacatctgatgtccttctccatcatttcccttactccctagagacaggtttgtcactgaacctgaagcctggctggcagccagtaagctctgtaatcctcttgtctctgttctcccacagtggactttgagatccacaagtcatgcccattgctaagtgggtgctggggattagaacacaggtccacatcttgcccagcaagtgctgttctccactgagccctctccctagctccttaggcacgagaattaccatgctcttcactgacttccatgccctttgcactgaataccttgaggaatgtgtggtcatttcctgtggctatcacaaatagtcaactctgtggcttaaggcagtacaagtgtattttcagacagttctggaggccagagaccagaagtaagtcttacgtagtgtggacaggacttacttctggaaggaacgtgcatttgtccttccccatttctggaagcctcctgcatcttttgacttacaaccccaacctcacaccattgcacccctggacctgaccccacgtcagtctcctctcctgcttcaatgttctctctgactatttcatcaaagacagttgctattgctttttaagacaatccagctgggtccagaatcatctctacatcccaacatcttctcccagtcccctactatgatgcagatgagattaatatgcatgcctccttagaagctatatcatttgatatcactaagctccggtgtaaagcctgggagatggtcccacatgcttctgtgaggtctaggggaccagactgtggggcatagcctaggagggtgctgtttgtcatcaccactgccaggaagcagcttctaggacctgctgaggcaggccttgacaagctcaggatagtatgtctccaccaagaagatcaagaagggacatgataagagcttcggggctgagaggcataactcctcgtccccatactccccttatcccaggtgagagctagacaaaccctggaagaaaaatggccccatagttccggcttcagtgattaatgtggtctgagcctggtggagtccccaatccatcaaacctatgttgtagactgcctgctaccaccaatgtgtctaattacacacgtggcatgcagcaaatgaggcaccgtgccatctcttgtcagaagagtctaggccactgcctgcccccttggaaccacaaggccctctgcttgctgctggatgcacctgctgctcttaccccacactaccagaacactcagacccctgcccgtggctcttagatcctgataagtcccaggagtggaggatcccagagtgcaggctctaagtctagtgacccctgttgtgctcacaggactccttccgtcttacccaaagatctgctgttgtctcggaccctccagggggtagggggactgccacatgtctgccagtgcacaatagatgtcttgtgaacgggcaagcctcatcttttcatctatgaagcaagcatatctactgagtgttaggtttcagaccagaggctagtgaagccgtgctgacctccagtcacctcttctagctgctgtgacaggaatggcaagccccccaccaatagcttgtctgcagatcttcagtctcattcctcacagatccctttaagtgctggaaagtgctccaggagagtgacaggtgccattctcaggtcctccaggaagtttacaggcctcaggttgcagactctgggacctgagaacggcagcactatgggtataactggcacacttcacctagatgcaccgctccgccccatccttggagccgcacaccccatcaccaaatgcagatccacactggaccacccatcagatgtggcagaaaatctccctgttcctccgaggcctagaagaagggaaccccctctctgccttgtggtcccgagcactcctcagagcttttgctctgttgtcatctgtctgtcggtccatgttgctaactgataactcttctcatacatctcttccacccctcaaatctaccttagtatccccttgaatgccaaactcaaaacctttcgataatcttaatagcagagtccaccgagttgttgttttgtaacagtcacgggcctaacaattgtgtggctgtgtggtatgtgccatgggtgagtgctcacatgagcggagccagagaacaacctccactgttgtttcttgggagctcttgttttaccttgttttttaacatagtgtctctcactggccaggaatacccccagtagactattacggctagccaatgaggcctgcggctctgctgtgtgtctttccagcactgggattaaaaatgcatgctatggattttcctcctgtatggctctgcatgttatcatcattatcaccatcaccatcaccatcgccatcaccatcaccatcaccatcaccatcaccatcgccatcaccatcaccatcatcaccatcaccatcatcatcaatcattcttttgagacaaggtctctaactgaaccagagtttaccaatacagctaggctgactggtcagccagtttctaggatctgcctgtttctgtccccaacattggacttacagacacttgccaccacatcctaattttatgtgggcatcagggaaatctaaattcaagtgcttgggcttgctcaataagcactccctggcccctcagctcttttttaggggtggtgctgggggaattaagactgagtcttactgtgttgctctgccttgaactcagagacctgcctgcctctgccttccaagtgctgagactataggtgtgcaccaccaccaccacccccttttttgcttaacattggttctggggctcaggctgggtccttatgcttgaaggggacaacactttcctggcaaagccatctcgccagccccttcgttgctctgagaatgagatcggatggagcagggaagagtgtagaaaagtttaggacatcctgctaaagtttattgttgctgtggctctcccggttacctgttccagaagaggcttcatcacaggccagacgacaaatatggcttgccattagaagaggatgggggctggggtgtagatcagaggagcataaggaaggagggagactttctctcagtggaggagtttggacgtcagtttctctaaagccccagagtcagagatgatgggcagatttatcaggggacctagggaggatggaaacatggtgaggactgcctgggtctttgctggctagttttatgtcagcttaacacagctaaagttatctgagagagggaacttcaattgagaaaacatctctatatgatctggctgtagacaagcctgtaaggcatcaattagtgatcaatgtggaaggggccagctcgttgtaggtggtaccattcctgggctggaggtcttgggttctagaagaaacccaggttgaacaagccatgatgagcaagccagtaaacagcacctcctccatggcctctgcatcagctcctgcctctgggttcctgccctgcttgagttcctgtcctttgatgatgaactgtggtatggaagcacaaaccagataaacccttttcatactaacttgcctttgctcatagtgtttcatcaaagcaacagcaaccctaaaaagacggtgtcctaacagccttacgtgggactgaacaccctgtccccaacgagctgctgggcacagctttcagcatgggaatatcttgctgcccagccaattagatgacttccccaaaacaccctcttcccacccccttgcagggagattatttcttgatgatttcagcatcaaaacaagattcacactgaaaactagggctttagtttagcggtagcgggctcgcctccagtacatgagttcatagtactgcaaagaagaaaatcacgttgcttcctgatgctcaagtgtcagtgttgctcacagtgctaatgtgcaatggtgctgtccctgaacttgaagtgcaacgtcttggttctatggaaaatgaaggaagcacatcggtcaggggttctctctgacccctgtgagggcacgctcctgagatcccaaaggaagaagaaaaagccagctgagagtggaaacagcccgacctgcagtgtctgtctgggaggagaggagcaccttgctttccgctgggcttctgctcttaaaagagtctggcagggtgctagagggagtgtggcagagtgtggtggggcagccccccagaaaagaaccaggaccttggtgcacattggaccaagagtactttgtgtccctgagtggaagctatggagtccatgccactggttcaggaggctctgccttcagtctgtgttgtttgtggactccagctttgatctgttctgtcctggcatttcggaggcggttagaactacctctggctgagaagaactgagagaaactccttagtatagcagatccccgtctggacagtctggcagttctgttttttgagacaaggtctcatgtagctcaggctagcctcaaactcgctctgtggctgagagcttctttctagtcttcctgcttctacctccagagtgctgaagtaacagatgtgcaccaccacacctggcttatatcacgttagggattaaacccaggacggtgtatctaccaagcaccacacaacaaactgggatccatctccagcccctttcaccctacacccatgtcttaaagatgcttgctcctaacacctagctccaaatattctgatttctccaagtccaggatgaggcctggggatctccttaattctaagcttacacagaccagtttttagcgaccttcctatttctttgacaaccaggaaagaagcgcagagtattagctttctggaatcatggagtcagctacactctcaacaacagcaatgctacctcagaaatgggggcatattaaagtcccctgtgcttcttgtcctcccactaagagctgaggttctcctggttggcctaaacccatccatatctgagcttgcaggtggcatggagcatgtactggggagagaccgtgaactctcagccacagagaccagtgtcctgctgtcctttcttgtctggcaccaggcctgaccaccatgatttccacacagcccaccttctgtgtctgactacagctaatggctcccagaagatcacttggtcctgggttgcacttagttagtatttatggcaaggtcacactctccacagagggcagaaaggctctgtggggacagatggctctggggtatctctctcagctcatggaaagccaacacactggactggggtgttaaggaaggaaaagggataccaggtggtgggcacaccttacccaaagtcccccaagggaaccattttacacatataagtctctgcctgtccccagcaggagtgtacaaatggagatgtcagcccgtaaattggcacactgtcacttaagatggtcgtttcgttgctgtgactgtgctcaggtagctaactttctagtctgtgggatttgaagatagcttttccaaggtcatggttgttgacaaacatgccacctggtaacttactagcatgattctggggcctgtgacagtcttcaaccattccccaagggctgcagctgggcagacaaaagtgtggctggtttcttctgaattcttggctctataccccagttttagctttgtttgtacatcttaaagaattgtcttcttcctcagcaagtgtgtgtgtgtgtgtgtgtgtgtgtgtgtgtgtgtgtgtgtgtgctccttttcaaagcctggtgagtggagacttgggaagggcatgtctgcctgcttcctaggctgaggtgctagatggactcaggccacctaccagaagccttgtcccttctcctgacatgacttcatccccaccatgttgttctctgtcattgggtctctctctctctctctctctctctctctctctctctctctctctctgtaaaacctgccatgactgacaacttactacctctgatggactggtcagcagacggagagcacacagcctggagcaggctgcccacacagcctgcccttgatggagggaccctcagatgaggtgactcctgcttccctagaggccagcccagccgttgagcagtcgagactgctgccctgcaaacatggtgatgctgtccctcctgctcataagagggaaaccgaggcactggacagcaacctgcccctttcttggcataacttgtgttagactatctcttgttgggataggtaacggagagaataacttgagaggagatttatttgagctcaggtttcgtggacttcagtccatgtcctccggctccatagtcataagcccatggtgaggcagagacgctcaccatgtctcttggtggcaggatcttgtgacagaggaggctgctcattacatggcagccaggaaacagagaattaagagggatccagaggtaaaacacacccctttagagttgggaagatgcctcagttggtcctgtgccagccaaggacccctaggatgcactttaaaaagccagtcatgggtggtgaacacttgtaagcctggtgccagggtggcaggtcactggggcttactaggcagnnnnnnnnnnnnnnnnnnnnnnnnnnnnnnnnnnnnnnnnnnnnnnnnnnnnnnnnnnnnnnnnnnnnnnnnnnnnnnnnnnnnnnnnnnnnnnnnnnnnnnnnnnnnnnnnnnnnnnnnnnnnnnnnnnnnnnnnnnnnnnnnnnnnnnnnnnnnnnnnnnnnnnnnnnnnnnnnnnnnnnnnnnnnnnnnnnnnnnnnnnnnnnnnnnnnnnnnnnnnnnnnnnnnnnnnnnnnnnnnnnnnnnnnnnnnnnnnnnnnnnnnnnnnnnnnnnnnnnnnnnnnnnnnnnnnnnnnnnnnnnnnnnnnnnnnnnnnnnnnnnnnnnnnnnnnnnnnnnnnnnnnnnnnnnnnnnnnnnnnnnnnnnnnnnnnnnnnnnnnnnnnnnnnnnnnnnnnnnnnnnnnnnnnnnnnnnnnnnnnnnnnnnnnnnnnnnnnnnnnnnnnnnnnnnnnnnnnnnnnnnnnnnnnnnnnnnnnnnnnnnnnnnnnnnnnnnnnnnnnnnnnnnnnnnnnnnnnnnnnnnnnnnnnnnnnnnnnnnnnnnnnnnnctccctccccccttcccccaaaggcatgcctgtaatgacctacttcctccaaccaggctcagttcccaataatgttatcaattatgtatctatccatgggttgattccttgatggttcattaatctgatgaaaagtagagtccttataatccagtcacttcccaggacgctgccctccagctgtcaggcaggcctttaaggacacttcagagttaaactataacacattcccagccatggcacaggtaggatttgaactccaggcagcccgattcctgccgcatctccccctgctctgagaacataagattctcagctcagacacgtgctcagtggcatggggcagacagctcatttataatggagcctggcccataaaagtttaatgaggagcttgtctgataagatgcctagtgtttgatctttgtgaatgccagctgctcatgtaagaggcgcttcctggccgtgactctggggagcattgatggggtcagctgggggcagcagtcagtggggagtgaagatgtagttagtcctgttgagaagggctgcatggggagccctgtgttctcagaagctgcaggggcaggcttctggccaggatttcctacaacaccaggaagtgaccctctgattcctctcctgtcccttggggttctgttggacgttcgccccctctgcactctaaggatgaaggcagagctgggtagggctaggatgtgaatcttactatatattctcagtacatacaggggctggctgattaaccaccacatgcctcagtttctccttctctaaaatgggggtgtgtttgtatccttgtaatggttgatactgtcaacttgacagtatatagagtcacctaggagagaaacctctagtcctgctgtggggaaggacttagattaggttaagatgagaagacccactcccatcatgagtggcgtccttcagtggactgggtcctggacttaaaggcaaagctttcagagcaccaacattcatctctctgcttcctgactggatgtgatgtgaccagccaccacatagaccaccccggccattacggactgtaccattaaaaactgtgggccacaataaaccttccttccttaagtggctttttgtcaggcattttgccacagtcttgagaaaaggagccaacacagcatggaaaaggttaatgtgaggataagatgagttgttatatatcattacataccatgtgtgctgtcgtgggagcctggattagaagtcccctcaaaagcccctgtccacggattcgtgggaggaagttaagtcatgggggtgttgctcttggaagagatactgggaccttggcctcctgtgagatagagaagctggcccgaccaccttcccttgtcctccctgtaatgttctctgccaccccaggtcaaatcccaccccagcatccaaggacttggtgcctgtgactttcagaactgagagccaaaacaaaccatttgtgtgtgtgtgtgtgtgtgtgtgtgtgtgtgtgtgcacgcgcgcgtgcgtgtgcgcatgcattgtatgtatatgcatgtgcacatggagacctgaggtcaattcctctatcaccctcgacgttgatttttgaaacaggatctctcacatgcttagaactcactgatggctgagctgccctgggtatcctatttcttccaagtactgggattacaagggtacaccacctcaccctgtttttatcttattaaattagttcagagagtcaaactctggtcttcattcttgactggtaaacgcttcgcagttgggctgtcttcccagccccagccgtccttctttctgagttgatttatctcacatatttgcaaagctcagtgacaccgtgtgtgcagaagcatggcagtcccacagcatcctgagcacacaccccacacacagagaaaagaaagatagaagaggaggagggaggggggagcagattgtagggtgacaggcttaaaggattgtgggctaacaggctggaaggaaggagatgtggaacctcacacatgaaaggggggaccagtgtttatcagcagaagggcctgcctcttctctgtaggccagcccacagagactgtctggatacagtgctgctgaggagagaaccttccccaggcacgcactagccagtactgcctttgagagtttatttgcgccccaggattaacctgtctagctttgatgggcgagcaggacattccacacagttcttggcaaggctaagctgtcaagtccgccacgtttgtctgccatccctacagactcttctttcctgaaagcaccctcctcttcctcctcctcttcatccccctctacctctgagaccagtaccagcctattcccatccagggcttcaaggcattgactttctagaagattccattcagttgtgctcagccaagggtgggttatactatagaccaagacttcacattcccagtggtaaccagtgtccaggtcccccagagaggatctcattttgacaagttgctcctggcctttcccctggcccagctgtgttcctggccttacttcttacctggagcaagtccaaggctatctcaagcctgtatcccagcacctattcgcctgaacgacaagcactctgctagctcttatcgttgaacttttttttttcctcatgtagcccaggccagcatctaattcatcatgtagccaaggatggttttggatgcctggtcctcctacgtccacttccgcagtgctagaattgtaggcatgtactaccacgcctgctttatttattccgtgctaaggatagagccaggttttcgtgcatgctaagcaagccctctaccaactgagctgtgtccccaggcccttcctatgttcttgaacacatctggaactaggcgtgtgaaatagcagtgccttcctgcccttctggctctcagggagctgagatcaagaaggagtgtgtgggcgtgaccaaacctctgttaactgctgcagctggggcttttagaaccactctgtatggcctttgtggcctccgttttatgacctcatttccctacgcaaacatcagtgtttacttagtgagatatctccaaatccaaatactgattactcttcaagaactctgttgagggatgagggcaaaaactcagagctcagctgggtctggtgaacacaggctctgtagcaggcctggggatctgcagggcccaatgtagattcaagtgcatctgtcaaaatgaatccaccagataggactagggctggccagtagggatacagagcagcagatgtcatccacagctctgatggaacaccagagtgacagagggacatgcctgaaatgctttctagtagcttccataatttcttcactacaggctccattctccattccagggacctcacccattcagccaacctcaccagaggcctggatccctgcagccatcctttctctaaaatctgggtctgctaaatatcaaaaacaagtggctcagtgaagcctcacagagacagatcagccagcatgaccaaggcactctcgtgctgtgcccagcctgagtgttatgggagagggtctgagtcccagggaatccactgaagcatctaagttcttgtattccaggttagactgggggctagaaatacaaatagagttttttgagaaagtaaaggcatcctagagaatgagaatgggtaaggttctcatgcctgttactaagataaagtagtatgatggaagcaacttggggggacaaaggatttatcaggctccaggttataattcatcattgggggtcagggaaagtcaaggagttaggaacttaaagccactggtcatgttacatctgcagtcagaagaagagaccaacaaatgcatccagacaggtcaagatcccttgcctagggaatgatgccacccacaataggtgggtgttgacaatcagatactgcaatcaagacaggttccccaaagacatgaccactgagtggctcaatcttgataatccttcactgaaaaatttcccaagtgattctagattgtgtcaagttgacaattaaaaccaaccaccacaactagtccttagagataagccctcaaagcactggccaggagccacatgaccctttgtaggtcatttatgtagcacctaactcacacacatttacatactgtgagcttttcttgttctgtgtgttgtatgaagtccaggcaaccaagtgtttctagtcttttcctaccactggcttattttatatattattattgatgtggattttttttctagtcccatgtacttcttacttccagtgtagtcgagtgaccttgtactgagtccaaaaatggcactggggatgagccaggactttgggagccccatgtcaccatcttcctgccctaggtctctcacttctctgttatctacaattatgaattcttcatccccaatttccatgccaatttctctttgacacatatccctaatagtgttattggcctagatgagcattttatatattatggctacccgtttccctaatggtgtattgcttagttttgctttgtggctctttctataaataatgcaattgcaggtattttcttggggaacttggatctcatgctttatagtcagtgttttatcttctctgcctttattccttccttcatctgttcattgttattagctcattctttcctgctgctctacagcaatctgaatctccaggcatctggggtgcacttgtgcccttcatcatgggggactcctatgtcctgtcctctgagctccttgtgtgtggtgggttctgtaattcaccccagggggttgaaatttccaattcacaggggtttcacattcttgtcatccagtatgctgagatttttgctccgtgactttgccaacggaagatcccacccatagggttgagcagctgagccacagcaggacagcactggctggggagatagctcagtcagtaagtatgattcccagaacacacatattgaaaaggagaggaggaaacgctgggtgtggtagcacaccctggtaatcccaggactggagaggtaaacactaatggatccagctccctggcgaacctgctgcccagtctgtgagttccataccagagagagacactgtctcaaaacatcaagctggatgatgcctgaagaataataactgaggtcatcctctggtgtactcgcgcacacacatgcacacatgtgcacacacatacacacacacacacacatgcacgcacaaacacacatgcacatgcacacttttgattttgagacaggatctcaaattatagctctgactggcctagaactctctttgttaacaggctggtctcagactcagggatcttcctgtctctacctctgcctcctgagtgctgtaattaaaggaatgcaccaccaccatccttagcaatatacacatttaaaaaaaatgtttcattcttttctgggccaggaatatagtccagagatgaggaattgcttagggcccatgaagagatgggtccagtatcacccaaaacaaataacaaacctgctgactttctcaaagtacaattgccctgagtacatgtttttttttaaatatgatttttggaattttccaattagatgtgtagagaacataatgaacaagcttgccaatatcgagtttcctatacagaacaaagcaaagaaacccaacaaagccccgagcaacaaagggccatcaggaaggaggtggagttcctgatgagcctgcagggaaccttctgggtgctgagatggcctgcctgctctgcaagaacagacacaggcctgcccacctcagccgaggggaaaagagagagcccaagctacaaggtctgtgaatacagttccctccctggcaggtcggtgggcccagcctggggcagaaggagaacagaaaactccatggagctagtaaccactgactcccagcagcttagccacggcacgagggcacgggttccccagttctgtcattacattgtgatcctggtgggtggcaggcatcttggggctgaagcatgcggtccagccttccccagagcctaagggcttggtgtgtcatgccaagtggtttctgctatggggaatcagggaccgtgtaatcccggtggcggcagaaaatcacaatctggagccctgtaagagcacaggatggaacatggagggtggcacctcaagggctgaccccacccctagacaggatctttaccaaccaaaaagtgggggcttaaaccagtggaaatgtattctttcctgattctggcaataggaagtcacaggacagcctcaccaggcctatggcaagacaagactgtgccctagtggctcacagagacgcttctctctccctcttctagcttctgctggtggctagcattcctcagcttaggactgcctcagtgtgatctctgcctcaaggtcacatggccctctctgtttgagccccgtgttcctttaggacctttgaggaccctgtgatgacacttagacctggctactcggatcattgcaaacgtcacgcttgtcgtgtctgccatgtcctttgttgcctagattcagttgaccataggtttcaggaatttaggcaatgtcaccagcttccttcatgtattctacaagcgtttttcttcacacccgatccacagaatcactgctgtggttgctttttgctcatgaagagacaggcacaaagagggcacacagttttcttccaaccacacagctcagagtaaactgaactgagctgaagtggaacccaggtcttttgctattatgcctgctattctcactgggtgttcatcatccatctatccatctatccatcaaacattcttcatccatccatccttcatccatccatccatcttccattcatttgacatactagaatgctcaaacctcttagtgggcataggcttagaacttggcaagcagacctagtcgatacctgctcctgggcctgtctacccagtggggagataggaacatatcactacttgtagttcctcccaagagagcccagtcatctgctaaactcaaactgaggaaggctccgtcttccacggcagtgcctcacgagatatctgaccttgacctgggactgggggaggaaggacacttctttggcaaggggcttctgatgacagtcttaggagaggaagagagatagctgagaggatacagatgggaaggcaggagctggggtcagagttgtagccacaggtcaccccagaatccagcccaggagatgtgtaagctgacagtcaaaaatgtctggtctaacctttcccatcttcagaggcccctaaaccaggctagggaccatcaactcatagtgttacaacttattgccatggcagtgtctctttgggtctcagtaattctgtctgtgagatgggacacaggctgctgcctgactctggcctcatggtcctgtctcagctgctcaggtctggtctttctactctctcccttccctggttggagatcagggcccaccctggtgctcaggccgagtctgggtgagtcagcacgctgttcactttcccagacaggcattgctgggtggggctcaggggcctcaaccctccctccccctgctttctttccctcctctcactccattaggaaggaacatgtccattcctgccccagggctgttccatgctacaaagcccacgccctcccttcatgtccccatctgtgagagccttgctcatactcccagccggcatcaccctcatagctcccctccaggaagacatggctcctgtcattctagctccccagggacccattaccaaggctctgggcgtgctagctcaggcccggtcttggtgctagagtgcacgtgggattctcatcacctcaacctctccttttgtctcctgccagaactcctgtgctgacatgtgagaagggggcatgagttggggtgtcaggagggtgagtagggtgtgctcccctgctgagctcttcagttctcctgttgttatatgagaagggggagcgctggctgagcacctactaaggacccggtacagttactccacacacttctcgtacatccttctgtctacatctgctcatccatctactctctcaccagccagcaggtgaaggatgcgtggctctaccaggtcacacacgagtcccaacactgagacttagtctcagtctaccccatctgtctaacttcaaagttcaaactccacctacagtatgtagggtgagctggagaccaactgagtgatgccccagagggaccaccaggccgagtttctggggagggcaccagtgaggatttgtcgaggggaagtttgtaccttagtgaactgaaaatatcagcatgtccaatttgacctcctgagagcagaggctggctttctttcattctggctcttgggtaaggctcgtgacattcttatacatatttgagggaaggtatgcatgggtacatgtttgagtgtgtgcaaatgtctatgcatgtgtgtacacagacatatggaggccagagaatcactcttccttactttttgaacctggagtcccccattcagctagcccatgagccctcctctctctgcctctccactgctaggactttaggtgcacactgttatgcctagcatttttcatggatgctgtcaatctaaactcctcctcatgcctgcacagtcagcgctgcccaccaagatatcctgtcttcagcccacttctccactttatccactctatcccacttcatccttggcgtccttttcaattccccaacctcccacagcacaggtgcacatgagcatactctcatactcccaggctatgattaagtagctgacatagctggcccttcttgttgtcttcttcccctggtccaacccaaagctcttctgagcttgatcctctaagagtttagaagtggatagatagcatgtgtcttgatttgactcccagggccagattcagccctgcacccacaatctagtaccctcctaaattgagttctaatttcagcattcccagaaaaaccttcagggctactcattgcccccatggctccagggcccagatactactgttgcgggcccaatctgccaactatctggcatgagggaagagtaaagacttgttccccaggcttttggtcaaatctgttatcagggaatggccaatcaccccactgtaccctggtaaacctgtttggggaagctgtcatagcttctctgcgtgccttacccatggccaccagcagactgaaagtcctcaaggtctgttctctaatagagttgagcagccccagagactggaacaccatccagtgtgcaagctctggttcggcacactcccagttacctcccagctgtgggcatgaggcaagaaagcattcccccaccccttctctggacccgtgtcctccttggggctacttgttgtacaggagttggtagcaatgcatcttccttgatgaccaccataacaaggtgtccagggccctgcagggagcttctgtgtgttccacagagcttggggctgagagaaggaaggcagtgcctgggcagaaaccctgttccctgtttccttggtgatggaggcagtctctggggaagggaagcagcatgcctcttcccctacagggcatcacctactctcagaagacagcctcttcctctgtgtgggacacagacaccaccctgagcactctccttcccttacagagtggccctatttttgagtgcatgtcaaaatacctcaacaacatttactcctgaatcctgccccagagtccagagggatctgggtcacatcagacagcctacctgggactgctgggtggtctcagcctggtggtagacatcttcatgtcatcactgactgtcttggggtcctagctaagctagaccacactgccagctcaatgccaaggaggccccactcctgggtttggggccacttacagccaccagtttctgtattcttgtcatttctgtcgctgtgataaaatacactgacaaaaggcaccttggagaagggtacagcaaccaaaagcagctggttacatcacaactacagtcaagagcacagagagaataaattcatgcatgcatgctttcttgcatatagcctggtctctatattatgtcaaaatacagccagaaatcctcacttgaagaatggtcctgctcacagtgggttaggtattttcacatcaactagcaaccaaggtatgcccacagactagcctggactagatggcccctcactgagatttttctcctgaatgatgctagcttgtgtcaaattaacaatgaaaactaagagtcttcaaaccccagcctgctgcccatcacacaccaaccttcccctgcagggcactcagcttccaaacactccattagcctctcaggctctgcctgagtctcctcttcccaaaaatgcctgtgtacagcaggaacatgaatgtccatcctgtcatagtcacagcgagagccacttggcctgacatccatcagccagccctgcttctcctcccttgggacacacagcaacctcttcacagcaaggccacaatcaagcctcaaagtagtgcagttccgcataggtggatcccctccgtagctggcttgagcatgaccgcagttcaaagtgacttgtgacatctgccataggcgctcctctgcccatgaacttgtagtccactggggaaaatgcctcggtacaccttcagaactctcttcctgggcagctatgcatgttcaaaggtgcctggatatgcaatgctactgggcagaaccgggtctctaagataccaacctaagaccctactggaattttttggtaggggtgcaaatacatttgtgaaggagcttcaggaagggagttaccccgggggcccgggggtccctcagtgtccaggtttcagatacaagaagggatttgcatgagatagaaaatgcaggaaggaaggcatctcgggctgtggaaaaaccacaagggctgcttgaggctagataagctcattgggcttgcaagaccaaggctccaacatcacagatggtaaagagtgatatagttgaaagcttccttctggatcaatggattgatatttgtaaagctcagatgtgagtcacctgcctgtcacaccttgtgctatgttgtgaagcaggctagttttcatgcacagttggacacccaatcatcacgtctggctttctcagtagccacactgtccactgtagtagccgatcagaatggaaccccacacagcttcaccaatctggggcactgctgtggtgcctctccaggcttcacactctacttctaacttatactgtggctcatgcatactttggatgagggtcattgtcctagtttcatttcctattgctgtgatgatacttcaacaaaaagcaataagggagaaggagttgattttaactcatagattccaggttactgtccattgttgtgaagaagtcatgacacaaacttgaaatagtcccatcacaccatcactcccagactcaaaagcatagaaaaataaatgcacatatggttacttgaatggctttttttcttctcttgctcagctcaatttgaccacactcacacagtttaggactgcctagggaatggtgccacccagagtagactttttttttctacaccaattaagacaatcagtccccccaaagacttgcccataggcaagcctactgtagacaatacctcattaagactctcttcccagctgattctaagttataccaaattgacaattaaaatgaatcacagttggtgaggatggattttggagtaggtgtctccaaaacctggaggccctaggtcaggtggccaagggttctaaaagactcattaaatgttgagtagagtcatagcctccaatgcatatagatgattgcagtcatcccaagcaatgaaaaccaagccaagtgcccacgtgactggtgagggtattcaagacaggggactgtgaatggaaagcatcaccacacagagagctagaacaatattctgtattttagttcagctcaccagcttgaacaccattcttgggcagttgcagtaactcagttggtaaagtttttgctttccaaggcagtaagactcaccctcagaacctacataaaagatctgagcatggtgccatggtatgtgcttacaatcccaaacctatggagacagagacaggtggatcacaggctcactagctagctagcctagcctctttgggttccacgtcggtgacagacatgatatttaaaatagaattcaaaaagccaacaagggagatggatcgcatctgagaaccaacagctgagatagaccttcggtctctaacgtatatgtatgtgtacacatgctacacctcacaaagaaagatttatcttgaatcttgaacttttccttcagctgcttccgaatcctagtggtctgactgaagccgaacatctacccttttctgcagcttttcactcagtctgatagcaatgagctcttaggagaccttattcctggacttagtgtggccgacgtcctatgtactgtccatgttcaggtattcatgcatgtgcccatgcattgacctgtataggcacacgggagcagggctgcaacccaaacatgtggtcagctgagctcaggcccagcaaacctgaaggaggtatccagagtttcaatacaaggattcttgtgatacaggttcactatgcagccttttttctgtgggtgtgaacaaataatggaggccagagcatagcttctaagtgtcactcctcaggtgccatccagtttttgttgtctctattgtccttgaactttgccaagcagctagactagctagccagtgtgctctgcccgtctctttctccatctcaatgtggctggagttacacgcccatagcaacctctccctgttcctactgtcacctccgggggtggaactcagatcctcgggcttccgaggcagacactttacccactaagccatctctcaaaccccttggagcttccagtctgggtccactgactgattctttcaaggtctgactctaagttagagctgacaaggagtttggcatagaaaattaaaatggcaagcttctgaatgaagtctgtgggtgcctgcacacgtcaatggctactcgtggtttggggttcttagtgaggtatttgtgccccgtgggtcttctctctgagaatgtcaccttttgcctccacaggcctcccaccctaagtggcagccctgtcatctcagatatctccttgatacgactttctccacaccctgctggccctggagagtcacccttcagcacccaccacccctacgtgaacccccatatggagcactacctccggtctgtgcacagcagccccacactctcaatgatctctgccgccaggggcctcagccctgctgatggtaagtagtgctggagcagaggcagcggggacattgggggtggtgctaggggtgactcagtcctcacagccactttcatcatcttccaattacacgtcaaattaaattttcatcaatagatatatctgttggttaggtcaaagccctcatgatccagtcagttccccagagcaccacctctgtacattgcatcggggacccaagcttttaacacatgagccactgagagatgtttcatatccagaccatagcagccacatcatagggacagactgctgcttgcaacacgccaaaggctgcggaagccagtgttaagtaagagattgtgtgggaatatctccttgaagtcagcatcaaaagggaggcagagcagagctggctgctgcctgagtctgttttctgtccctgtgatggtcaacacagatggcctctcaagtcccaggaatcccctggaggtggagttacaggcagctggcaccccatcccccagagatagaccaataactttgagtaggctcagatgcttgagaaagagtggaccagcccactggagcaggttgatttgaaccagaagtgagtagaatcacataacatagttactttctcagatctaaatttttcctaggggctgaagagacaggtcagttggtaggtataaaatcagtcctccagaacccaggatttttaaaaagaaagtaatcaataaacagggcccagtggcaagcagtcggaatcccagcattgaggaggcagggcctgaggttcacttgtcagccagtctggtggaatcagtgaggtccctgttcaaggagaggccctgtctcaaagacagtggggagcaactgaagaaggcacccagggttgatctctggtctccacgtgagcataggaggtgacggatgggctaggaggtcaagcgttgagaccccagaccaaagataaattatttttccttccttaaacagtaatttttttacaagattctatttatatattttcattttatgtgggtgtgcatgcatatttacataggttcccctagaagccagaaacaagtattggacccactggagctggagttaggggtggtagggagccacccagcatgggagctgggaagtgaacacgggctctctacagtagtggtatgtgctcttagctgctgagccaccccttggacagtagattctgatggctcctttctcttgcctcctgtgacagtggcccacgaacatctgaaagagaggggactctttagcctcgcagccccaggcaccaacccttcagactattaccaccagatgaccctcatggcaagccaccccaccccttatggggaccttctaatgcagagcgggggtgctgctagcgcaccccatctccatgactacctcaaccctgtggatggtgagtaccagagggtgcaacatggggtgaggggcagggatgatgtgaatgagggtgactgactgccggtcatagaaaacaggtctgccctccctttggaggtgagagacacaaacagaagtctgcacttcgtcccagtactgtctatactaccagacatggggactgagcccaagtactaggatgggtggccaagagacctgtggtcatcacaaaggatgggatgcactcacttaacttttgggaaggatctatagtgggaggtacagacaccacccaccactgggggttggtaagctaagagggaatggggtaagcaaaatagggatggagacgcatactagggtagcgggatgcagttttgagacatagagagtcaaggtatccctcactaaggtgtggtggatgctattcctgcacagaactgaagggccaacccaccaactggcttggtgaagagcagtcccagcagaggacctgcaggtgcaaaggacctgtgttcctactgggagcccagtatgatctgagcttgagagaccagtgtgatcagcagtaatcaggtgaaagacaggagtcctaactggggtcagtgttccaggccgggctgtgccaacaagttgggacttgactaaggctttgcacgttgctggagtgagatgaggctgtggaaccattttggggaggatgtgcagagaaggaaagagctctgatgttccatttgaaagtatcttgttcatgctggtctgagaacccagtcggagcggcgagcagcagtagaccccattggtgagctgtagattaatccagttaagggggatgcctgggtagagatgtatgacacgttcccagcacaggtgtggtgtgcacggaaggaggaggccattacttagtgtgctcttggctatgaccaagtatctaacctctcactggcccccgtaaacaaatcctgatgaaagcagcttaggcaggcttattgggtgtggctcacactttaaggagatcatgtccatcatcgtggagatgacacggtggccagagtgtgtgacatccatagtcacgaagcagagacaggccatgctctcctttgtattcagtctgggaccccagcacatagaatagcccacgttcagggtgggtcttttcacctcagtcagcacattctagaaaatcctccacacatgtgtctcctagataatgatctctccaagttaacaattgttataaaccatcataaagagtcaagggcaaagccaggatcgagggtccaagtgatagggtgggcttcactgatcaaggcggtgcatgtgctagactgctttgcagaataggaggttgggagtcttggatcgaggaggtcctaagtgcccatcagatgccaagccctatcttctcactagaatccatgctgctttcacggggtgtcttagccccctgactatgagatcctgggtcagcatacaacccctgtcatgagaaggaaactgaagctcggtgctgttgcccgcccccctccaactagattccactctacctggcaaccctagagctgtccaaggatgcctggtatgtgggctgagtagaggcgtggggaaccaccaccaaactctaggctggtgccgcctcctggctgctgtcttctagtcctgccgggagcagcatcttcatgccacagtggtgggaggagacagacctgcagagaggccatctggtcctgcagggtagcaggttggaaacgggctgtggcagctgttaagaggccgccgagggtgcaagattcagggtgggcccatatcatccaggcttcgtctcacatcataggccccattcctgggtttcctgccacaaccgccactgcagctcccctcaggggccttgctccagttgagctatctctccacagaggcagaaccaagagtgctccttctccaggaactctgtctagatgcttcctgcctcctctggttgctcctgcctctctgagttttaaagaaccaccccaccacaaacgcaaggtcaagttgctctgctcatccctgccattccctgataggaggcttctgagtgacaaagcagtgtccccaacactcagctgagtgtctctccctccctaggaggatgctgggtccaggattcggcacagcatggtattaagtcccatccttgcctctgacacagtgagatgagggactagggagggtgcatcctggacacggtgtttcccagcgtcgtaaacccagtcacaactacacagcaggagaggaataacgagatccagagcagagtcacgcccacatgccagcttctgccattctgggaagccctcctccaaggctcagaaccagatggtggacatcactggcaagtagacagacttgttgatgccatggctaggggaccaagttgagcaggtggcccacacatcaggagaagcagaactgggcagacaggagttatcctgtgacagccatcctgagtgcctgactgggtatgcatctccatgcagtgccatgcatgtgacagagagaggaatgacagtgagcatttctcctatggctggagttaggacgagcaaacaagtccccaggcctctaggcggggttccaaaccttactctagcaaggccataccatccattgccagtacctgagctctaccctccagaaggcggctaggctgctgggtctggatccggcagagagcagcagggcaggatgcaaagggggccagtatgaaaactagtgaggggacaccagagaggacagtgagtgggacacagggaatgtgaagctgactgaaggagaatgtagtaaaggtagaatgaaggtaaatgttgtctacttaatgtatagactgggtgctcaattagtgctggtgtgacctctcactgccagtatccgtctcagatccgccctgatcactggggatccatatcttagttgtatcacctcatgcttcctcccaggccatggaccactctgggcatcatgtcctcttcgtgtccccatccattgtccctgggcatgctgtgtgtggcttgtcccctctctccctcgcactgttgttaccagtatggcagcaataacaaaccaggctcagcagcccatcctcagtgggccagttaaatggagcagaagtagtgaaaagtgtgtgtgtgtgggggggggggtgcctattcattgtggccacacaggaaagaggaacagagagctttatgtttacgtttacatggagagcaagaggcacacatggctaagcaggcctgatcaaggtgtggtctagccatcaaatgctccctgcaaagtggtctggcaagttatcacaactgtgggaaatctctttggaagacaagctccccctccccctccagcagcaccaggtttcatccctgtccttctcccagcatgagtctactgggggaagttccatttcatttatttatttatttatttatttatagtccgtcgtcagttaaccaatgggatggacacaggtgtttctgtagaatgtcttcttctcggcagcctcattgctggctcccagagcagatcccctgatgcttcctgctctgcctgtctgctgctctgccatgcctgagggcttgagggctgtgcagcaccaaaggcatcatggacatcaaggcctgggcacctgaggcaccatgggaattccaggcacccaattctagccgaccgggatttctttcacctaagacagtcagttctgctgctacagcaggtggctcacagcctgtaagacctgatgtgtcaggagtggccaacacagaagaccagggagagaaaggtgcagcacaaaacagaaaccactggaatggacaagggagctgctggcagctacgagtggcctagaagggactggggacagctccgttccccagaacattcaacattgactgcacctgtctaagaaacaggaaggccccgggcaagaggagtccatgggtcggtggataacttaacacagccacctcctctctccacttctatattcagatcagcagattcccacacacctgagcagcactgggatggcaggcagtgacgggggatggctgggggctggttttataaacccaagaaacccataccaatccatagcagtcttctatttctcctgttggtgcttctcagcagaacttttccaggcagactcgctgttcggtttctctctcaggttggaacctagagtctctcacacgctatgtgtgattacttaaccactgagctaggcccagacttttctttcttttttcttaaattctacattttatttatttattgtgcttgtgtaagctgcatgccacagtgctcgtatgggaattggttttctccttacaccatgtgggactggggaatggaactcaggtcatcacacttggcagcaccaccatcaccaccatcaccaccatcaccaccatcaccaccatcaccaccatcaccaccatcaccaccatcaccaccatcagccatctcagatctagcccagctcttttcaaaccagtggaaggcagagcttcagacttggcttcagatttttttttgtattaaattttccatttattgttcatcatatcattgtctttcttgtatttttgtctagtagctgtgccagttttcctaatagaactattattggacatgtggtttcttactgtttttcaaaggcttactattttttggcctcagatttttaaaagtatttgggggcatttccacccaatttaggtacctgtgcagataccccatctgctgtgtttctgcaaaagatgctaaatcctaaataaggctgggccctgcccaatctgcctccagggcattgccccttcctccttctgcacttacgttgagcacgtgagccagggaagcccctgccaactgctgcattttctgcagcccacccccataggatgattcagtcccctcatggaaaacttagattttttttttttaccacgttcccttttgctcaatactctgacagaagaaatggtgcacactcattcactacctgcttgctcagcatgcgtcccagttaggcttcactgttgctgtgataaagcgctgatcaaaaccaacttgttggagacgggatttatttcacgttacaatgtccaggggacagtccatcactgaaggaagccagggttggagccaaggcaggatcctggtggcaagaactgaagcagaggccacggggacactgcaggctgacttgctccccatggcttactcagttggcttttttgtacaacccaggaccacctgccaagggttgccaccacccacagtgatccaggccttcccccgcatcaaccatcaatcaagaaaatgctgccacagacttgcctacagccaagctggtgaagacaatcgcacaattgaggtgtcttcttcccacatcttcccagatgagtctagtttgtgtcaagttcacaacacaaacacacacacacacacacacacacacacacacacacaagtaaacattccaagccaattctaggcactaagcaagaggctgaacaccacatcaagttctcagtctgtctggccaggcaccaggcatctttttggtaagcaccccgatgcaggtcctgacctgacctctgactgccttctttctcagcacctaccttcatgtcttgagacagggacacccagcagagatgagaatgtttcaaagtctttgtgtgtccaatagaggcacagaggtaggatctttcaaatgggaggtggcctgagcagaaggctggtgggcaaggccctcgtatccttctccaactcaatgacatcgttttatgtgagtcaaggacccagtgcacaatagtgcatgtagtattcataactggcttcactttgaggattaaaagaatacttcttaaaaggtgtctaagggttttactaccgttgaagagacaccatgaccaaggcaactcttttttttttttttttttttttttttttggttttttggttttttgggacagggtttctctgtgtagccctggctgtcctagaactcactttgaagaccaggctggcttcgaactcagaaatctgcctgcctctgcctctacctcccaagtgttgggattaaaggcatgcgccaccacgctcagacgaccaaggcagctcttataaggacatttaattggggctggcttacaggttcagagtatactccattaacctcaatgtgggagtgttcaggcaggcatggtataggaggagttgagagttctacctcctcatctgaaggctgctaggagaagaccacttccaggcagctaggacgagggtctcaaagcctatgcccacagtgtcacacctattccaacaaggccacacctcctaatagtaccactccctgggccacgcacataaaaaccatcacaaaatggaacttttttaaagatagggactcatgtaattaaggctagacttgaacttactatgtagctgaggatgaccttggatttctgatccttctgcctctacttctcaagtgctaaaattataggcctgcaccgttatggagacttatgtgttgctgggtttggaggccagggcttcatacatgatagactctaccaagtggctatatccccatccctagaactttcctttttcttcccaaaggggcaaacttaaccgtaacagaaggggatgtctctgagaaccacaagaatatctcgtgaactttgtgtacaccccacatgtgggacacattagatgggtcagaaagacagcaaggcctctgacaggtccagacaccaatgccaccatccaccctggtccaaaaggaggctgacctgaggctctgatacaggctcacctctccctccatgtcctttcttcttctcttgcctgatttttcatcaggaagaccagaagctgagccatgaaaaagaaaacagaaccagtcagaaacccaaggtcatccactcctctgctggtggctctgtggagagcgaggagttcactgctcgtcaccagtccctagcaagggacattctcgagctaggctgttgacgctggcagtgtaactgcagggccccagcacagcctacccccaccccccatccctcctgagaagattgaaatgtcctgattgaagtactgtctgctcacagccctataactcctcccagctgtgtgttttattgtcatattgacactaatgtgcctcggatgtcacctccatcctgatgctcattctttatgcagggcggggaggctcagaaaccgatggcattgatctcacaggggagaggcagacattgctggggtctcaggggactgcttcaggcaggaatccaggcccagcctggcacagaggggagactgaggctgaggagaacaaccgtgggtcccacagactgctgagcacaggctgggaatgagctggggaagagaggccctttggtgaatttgagttgaccaggatacgattctacttactcagttggggaactcaaagcccaggccttggctttctctgccctcggggcatgactgaaaaatggggccactagcctctaagtccccagctccgtggcctcgccatggaggctccgtggagtttagatgggtaaaatacttgggctgaattcctcagaacacatcttgagagtgagtgtagaaaagacctgggccaactgcagtggattatacctgtaatctcagcactgggaaggtgttaagtggaagagtcaggagttcaaggccacccttcgctacaccacgtcctgtctcaaaaaagtaaaagaaaaaacagtggggtgagatgaggaagatttggccagttcctaaagggcttggcctggaaagcatgaggacaggagttcaaatccccagaatccacgtggaaagcagcagggtggcccgcacctgtcatcccagtggtggaaggatggaaggcagatacaccaggatccctgtaagcttggaggctagccagcctagctgaatcagtgtgcccaggccagagaggcctgggaggagggaggggaagggtgggggnnnnnnnnnnnnnnnnnnnnnnnnnnnnnnnnnnnnnnnnnnnnnnnnnnnnnnnnnnnnnnnnnnnnnnnnnnnnnnnnnnnnnnnnnnnnnnnnnnnnnnnnnnnnnnnnnnnnnnnnnnnnnnnnnnnnnnnatacgtaggaggaacaggccacatcaggcatcctctgagggacgataggcaagtggctggtcactcgctggccagtgttaggacaggcagcaaccacagatggatggcggctgtgaatgctcgagtccccaaacataaatcacaggaaaagcacaggaaatgagtgccaggcttttcttcctatttagtgatttatcaagggaagaggcgcgttaataaacacatttccctcgagggccaggaataacggagatgaatactactgtcagtttgagcctgcttcctcttgttaggggcacccgagagggtgggagtcagaatgttagcagcagaatctctttctgaaaaatatatgacgatgggctgtggtgatagctcactcaagaaagtgcttgccttgcaagcctggggccctgggttccctaggatcgctggggaaaaaatggtgtgctagggcacccactgaggaggtggagactcgtgaatccccaagactcagcggccacccagcctagcttccttggtgagttctatctgagtaagagaccctgtctaaacaagaaggtggacggttcctgaggaacggcacctgagaatgtcttctggcctctacgtgggcatgcgtgcacacaaacagacacataaacacacatacccaaagaaaatatgtatacggaaggcatggataagtcatactttagtggatgctagagtcttcgtgtccccctcatttcataacacggagtctgtaggaggaccccatgagataaggattatctagacatgaaattgaggtgtcagagagcgcccagatggaggcctgttgggcaaagtgctgtaggtcactattctaggatcagtcatcttttctagactttgggcctttccttttccctaaacttcaggtccactctgcccatccgtatccctcaaagaagccctgggaattagacagctcacacagacatgtggacaaggtcataggcaccaccctcagaactctgtatgacttcacagcaagtgtgcacaatacggcatgttgcctagattggagggaagctggggatgtctgtatgatgtcctgctcagcatttgggcaggaccaggacttcttacaggcagcatctgcagccaacacataatatatgaaggcccggaggttccagagggaggccagaaagtcagggcaaccattgctccttgtaggtttctagaaggcaaagacacatctcagcattcaccttaatttgctacggttcaggccactcgtcatctaactttacaccttatggcagccctgaagggtgctgctaccataagacccctgctgtaaagtgtgagctgaggcagtgaagaagcaatagggactacagtcatctagtgatgtcagaccacttctaggacactttgtctaaaggagagatccagaattcctgggagggtggggggtgatgatgatggggaaaagaacaatgtgtgtgtgtgtgtgtgtgtgtgtgtgtgtgtgtgtgtgtgtgtgtgtgaattagggttttctagagtcacagaacttatgggatgtctctatattgagagattgagggaatttattgtgatgacttacagtctgtagtccaactaacccagcaatgggcagctgtggttgggaagttcaaggatcttgtagttgctcaggcctatgaggctaattgtttgagctggtcttctgtagaagtaggttccaacagatgtgctggcaagtaagtgcaagcagtcgaagagtgaatcttccttcttccaatgaccttaccttccagtgtggcccaaattaaaggtgtattccaccatgcctggatttgggatttgctttgtcccaggctgaccttgaacacagagatctccttgccttagtctcctgggattaaagggcatgtactaccttgcctgggcctaagctctccgtggccactgtgccttgagatctccatgccaagatccaggtcagaaacttgtgtcctccagcctcaagatctggatcacaggtgagccctccaattctggattgtagttcattccagatatagtcaagttgacaaccatgaatagccattatagtacatatgtgcgtatgcctacatgcagggctatatgcatgcatatccatgaggtgtacacatttaagacaacacatttccaccattcagtagcccagaacttagggtctccaagtgtgagcacatctatgtgtcacatggcctctccctgctgctcctcttttgcctccctggtctctcatggtagccttctcagtagggtctgcggagcagccagtctacaatgtggaattggagggctcacctgtgatccagatcttgaggctgggagacacaagtttctgatctggatcttgccatggagatctcaaggcacagtggccatggagagtttaggcccaggcaaggtagtacacacctttaatcccaggagactaagtctcagccaggagcccagcatcacacacagctctgcttagtaagtttccttcagggggttcagatgtgaacccccctggggggtgtttctggtgtgaccaccgttgcaacaaagctcatggtcctgtggcttgtaaccctgttcagtctgctcctcgtgagattctcttcagttatggaaagggcccatcaccaccaccaccaccaccaccaccacgccatggcatggagaaatcatgaatattcatgatgtgtagagggtggagaatctgtgatactaacaagccttccgttggctgtctcccagcatcacgattctctagtccacgtgtgaccccacgactgagccgcaagcgggctctgtccatctccccgctctcagatgccagcctcgacctacaacgcatgattcggacctctcccaactcgctggtagcttacatcaacaactccaggagcagctcagcagccagtggctcttatggacatctgtctgccggtgccctcaggtgagccccaacagtaagcagtgggctgagaactgggagccgggtctggggccacatggcagggtggagatttacactggagaatacagaacttaatactagtgtctcaacatgctagcaactgtattggtagttcaaaagcaataatgagagtggggatgtggctctttggtacagtccttgactgggatgcacagagttctgtgatccattcccagcattgtataaaatcaggcatggtgacaaattccagtcatcatagcacctagtgagtctgaggacagcctgggatacatgagagtcgttctgtaaagaacaacaacaaagccatcgtgacacagggagttcacactcacaccaacaccagagtacatccttatgtagtaagtctgccaccaggggcctctgtcatgatgtcagaggtaaccaaggtcaaaagtggcctccttggaagctggggagacaatgtggtaggtagaaacactaggcgtgtgagtagaaagacctgagtttgaatcctcagaactcctgtcaatggccaggcatagcacaagtatccagagcccagcacttctttgggtagaaggaggtggagacaggagagtcctgcaagctcaaggttgcattcaaggagctaggtgtgatcagcaaggctaaggacatccgtttgcaaggcatgtttgccatcttgaacctcagaatacagtcctctctgccaaggatattggcttggcagtgaacccactccttcccctgtcctctcctgttctccattgcagcccagccttcacttttccccaccccatcaatcccgtggcctaccagcagatcctgagccagcagcggggcctgggctcagcctttggacacacaccacccctgatccagccttcacccaccttcttggcccagcagcccatgactctcacctccatcagcaccatgcctacccaactcagcagcagtagcagcaactgtctaaatgatgccaaccaggtaggtgggtgcaggaaactggggtgggtcctcactgctcaccccgtccccaagggcggttcatgctaggaactggtagagatctctgcactttagcctgactggttggttgcttttaggacagagatcacataatggcaagggccttaaactgggccagaagccctggcctgggcccatggtaagctcctagtcactcagttctgtcttctgtccaaaaaactaaaagggatggagaaaccctctcatgcaggggtgctgcatggagacacactacatacatcatgggaaacaaggtgccttccctttcccctacccctcaccccacatcccccaccccccactcctgtcttggctggccctggttggaggaccaatctaagagactcagtttttgatgtttcaaactacagaagggaggaaatgctagggagataataagtcagtggctgacgagctgctttgcaaacatgagaacctgagtttgactcccagcatccatattcaaaaagccaggcattgccaggcagtggggacacacgcctttaatcccagcactcaaaaggcagaggcaggcccaatttctgagtgcaaggccagcctggtctacatagtaagttccagagcagccagggctacacagaaagaccctgtctcagaaataaggaagtaaaaaaagaaagaaaatccaggcgtgttggtgcatgcttgtaatagtggctctgaggaggtggagacaggtggatctctgggcttacaggtcagccagcttagcctaactgttagcctaagtcccaggtcccagtaaaagaccctcaaaaagacaaaatggatgctgactaaggaacacacttgagaggaacctcttatctctacgtacgtgcatgcacatacacacagatatacagtgtactccacacatatgagcatacatgtatatgtttacacatacacataaatggtgatctatgtgagtaaactgtagagccacagcccatggaatttgggggtcctctgtcttgtgcctatgtgacagactgtcctctgccgtctccctcagaacaagcagaacagcgagtcagctgtgagcagcaccgtgaaccccatcaccattcataagcggagcaaggtcaagactgaggctgagggcctgcgtccagcatccccgcttggactgacacaggtaacctgctgctcactgccactgtccttaggctgggaccaggctggatctcctggtttggctgttgagctcctagtggttaatggatgggggagaaggaagcagtggatggatggatgaatggatgcatgccttcatacaaggatggataggtagatggatggatggatggatggatggatggatggatggatgggtgatggatggatggatggaaaatggaatgggtaagtggattgatggccatctgcacaacttagagagttagtgtgggggagctcacagatgtcctgcacagttcctctcgcctcagcatatatcatttttatctaatataaatgagtaaatgaatgaacaaatgatctacccttccatcttactatatgtatgactgaattaatgaatactaacgttttcttcccttccacttccttcagacttcaactatccacacatacagcctcagccttgagtctgagctcctcacgttcccctaagtggctctggttctcaaggctgccccctctcctggagcccactgctcacactagattctttagtgctggtgctcctgggtaacttaaatgccggctgctgggtcacttcaggtgggaaggataactcctggtagtgagggagccagcatgactgggcccagcctctatggaggggcccttggaagtcctactactcactctgttcctaggaggacacacaggccattgctaccctcattgtcatgcagggttctggcattcgaaaggcttagccgctgctgaccttgactttaaacctctgagccctatgccctcacagtggcatagtctccatctgttagtccacaatgcacagtcaccaaggatactcaagcctccctctggtccctggctcccagcatctgctggtctatcctttatcaagactgtaaaccatcaggcatgctctaggcacttaattttcatgaaatattaggtcctcttattgtcaggcaaacagaggggttgatgacaaattcctctcccctcactgacaccggcactagtcagaacatgatgcatagtttccacgaggctggccatcacggggaggggtgtgtgctgaaattgatgaggacagcacatatccaggaagataaacatgcagaaatgttgaggacagggaggggcaccacggtgggtgcttgctaagtaccttggagtctcaccatccatgggtggggcctcattactgccctatgctctaggaaagccacccagaggccttcttcttgcctgtgcccacagcacttaggaaggaaaggagggagggaaggaggagagagaaagagagagagagagagagagagagagagagagagagagagagagagagagagaacttttgcaaggggctgggaagatgatccagtcagtaaagtgcttgccatacaagtgtgaggacctgagttcgaatccctagcatcatgtaaaaagctggatccagggacatgtacctataatctcagagctgtggcagagacaggtggatccctgggccttgttggtcaaccagtctaaccgcgtcagcaagttctggcatttgtacatgccactaatcccagcacttgggaggctgaggcaggcagatttctgagttcaaggccagcctggtctacagagtgagttccaggacagccagggctacacagagaaaccctgtctcaacaaacaaacaaacaaacaaacaaaaacaaagtaggtagtgaagagtgatagctaaggctgtcctctggccctcaattcatgtacaacagtgtacctgaaaacacacacacacacacacacacacacacacacacacacttgcataagaacagtttcgtataagtgcataaggcatttcaagcatattctctccatagcctagttccctctaccctcactatcaccccaccccaccctcacccctagcccctcccccactccccttgatggccttgttactctcatgtcacctgtgcagatagggttctatgcacctataaagtcaaggtctcacaggtgagagacagaatgcagtatttgtctttctgagattgattaattaatttctttactgtgattagtttgtcacattcatccaacatgatactagatgaaactataatcaggaagacaagggtgtccgctttcccaacacttgttcaacacagtgcttagagtttcagtcagcacatgagattatggcagggggaacacatgagatacaaatagcaagggaaggagtcagaatacccttatttgcagatgacatggatgagaccctaaagactccactggaaaactctctaagttgaaaaccacttgcagcaaaatgacagaatacagaatgagcacacagaagtcagtcacgttcctgtgtaccagtaacatgcagagaaagaaactatgaaagcaaactgggcatggtggtacattcctgggatcccagccctgaaggaggaggcaggaggactggggactaaggccagccttggcagcatagtattgccaggctggcgctctgtgagtccctctctcagataagtgagggatgggagcccggggaggcagtccactcacaggcactgcagaaggccttccctcagagtcgggtccatgtcgtcccatgtgtggttcacttgcctccctttggcagaaaggatagaggtaatggtgctttctgctgaagccctcaaattgcagactgggaggatccttgccttggccttggggcagcccactgctaggccagctggcctgcagtgtatgtgtagggaagataatcccagatgttcttctgttgcactgtgggcactaggagacctctctacattctcatctcaacagccgctggctgctggaaacccggaagtgtggtgttccgactgacctcagtgcagaggttgcttacatcgacatagtagcagcattgttctctgcacagccagggcgcttgttcagagggtccctgatggtgaacccggggtcccttttggaaaaggttgtagcaatatcagagagttcctgtgtctgtggcccaccatgggaaatgttgtcgttctgagatgagcttgctgttcacgagtgaccatgccagtggacactccggtccttaacctggcaaagagcctgtccctgttagccagcactgtccttgtttccctgaagctcttccttgtgtctattttcctgttttgcagcacaggggattaaacctggtatcttatgtgtgttaggcaaatgttcttgatctaaagccacaacccaggagagtcaggatacattcctgctgtttttaaaaataagttgaacatggccaggtggcatatgcctttaatcccagcctggtgtatacagtgaggtgcgtgatacccagggttatacagagaaactgtctcaaaaaacttaaaaaaaaaaaaaaagcgagggttggggggggagctgtctttgtaacattgcttctggccttactttgcctcccaggatgcctgggagacctgttaaacactggattgatctcactagacttcatgggccctccctggaccttgcctcccagcctggagaatgtatccctggtcatgacccccattccagacaggtccactgtgacatgaggctgtttctctaagtttcatctttgaaatagcctcataacactaatgtagtcaaacgagtgctccatttccatgacatcactctgaccaacagcaagtaggaaagaaaggggtttgttgccttacacgtccaagttaggtccatccctgaggcaagccaagacaggaactcaaggcagaagccacggagggcgttgcctgctggttcacgctcagctagcttttctatggggcatggtgccacccgcaggtcctgctgcatcaattaacaatcaagacaatcccccaaactggcccacaggccattccaatctagacagtccctccgttgagggtcccttaataggaacggagacacaagtccatatctaagctactccagtccccatatcggccatggagaggagaagccacatctccttgagcttcagattccctagctgtgatacaagagtgaagaagggctgaggcagggaagcgtgcctaagggtctaaggggtgtgcgttttctctgcagagcacttggcagatgctggcactgtgctgatgtgagccgagtgcccatagtgcacttgagaaagaagaaacagtatgacaaaaaatatttagaaggaaaaggacttggagggggaggcagttctccaggcaggaacctcacacacttaatggagtttccatctccacatcgccagtgattgtgggcctcagttacctgcaacagaaaccaaacccacgttcctttcttccacttgcaaatgaggggtggggtgggggtgggggcagtgctggttagaatctcttcatgatgaccagagagcaggaagggcccaggacagttgcctgtgacaaggggttcccttatgctgagctgaggaaagaggctgtggcgtgtgactctgtgtgcctatgttgtatgtgtacagatgtatgcatgcactgtgtacatatgtgtgtgtgtatgcacaagtacatatattgtatgtgtgcatatgtgtccacatgtgtgcagccttgggcccttggtatgaactcttgagtttcatctcagcctagcctcaggaccaggctaccaggcatggctcatgtggttgtggtcttccctatcctaggagcagctggccgatctcaaggaagacctggacagggatgactgtaagcaggaggccgaggtggtcatctacgagaccaactgccactgggcagactgcaccaaggagtatgacacacaggagcagctggtgcatgtaagctctgtccccagctcccacccagggatgcagagccccaaccacaatggacctagagccttccaaggcctgtgcttcaaaggggttgaagggggacccccacccctagaaaatgggaggtatggtgaccaggtgccttggaggcccttcaccctaccccaaacacatatgtagtatatgtgaagatccaagaaaatacagaagtgtgagaataaggggaaggaataatgaagaacacacacatacacacacacaccacaggaggtgcacagcaaaactgggtgctctgaactgcagtccgcatgcacatgaagttcattctagaacttgaatctatatttccaatctctttgcagcaagtgaaggcagaggtagcaatcagaactgtgcattgcaggttcaagcacttaggttggggaaacggggacaatgcttgggctaggactgggctcaagcaaaaatacagaggtgacaatgtaaaaagatgtgctctgtgattgagagactgctcagtggacaaagtgcttgcaaggcctggctccagttcctaagaaccctttacaaagggggtggggtggggtggggggtgtccagatgcctttaatcctagtactggtgaggcggccaagaaagatgcatgccaacaccctagccggcctgatgagttacagaccagtgagagtctctgcctcagtacccagtggacaggatcccctagttagactcctgctgtgacctgaggaggactgttttagggatatctctgtggccctaggggatcactcctacctggccctggaaagcaggctgctctacaaagaggacctgcctttgcctagcactgcctctctactctctgggaagatggatggcaagccagactccccgtccattattaacaatttgtcgctaagtaaaccaataagaaaaaaaatgaaaggcgtagtcaggaagcatttttctcatttgaaaggctttgtgaatggaaagggaggctgataggagaagatttttctagacgttcaaagggctgctgtcttacaggctcccaaggtggtggtatctatgctgacagttgggatgctgcacagggcatcgggccagtggcctttcctcttctaggacatggtgttaccagagcatgttactcagctccttgatagcagtgtaaatggcaaatgtatttgtctgggagagactacagctcacgggtttacgttttccaggagtaccttgtaaaaatacagaggcagaagtcaggctgtggctttgttgtgaccttggctgacccacctcactcatcggggctgtttagccccagtgtcagccaggcactgggcctagagcccgaagctgagagtcaggatctggctctagcctccctcaaaaacggagctgaggaagctctattttccactgataggataacctcctttatacatctcacaagccggaggatcagtatgtctgcttcactgcacacttagcttgtacgtcagcatccccatagtcaccatgtccacacaggtcaggccctgagcttcaactggatgtgtgactcctttaatcatcagtaaacttagaggaggagccagagagatggctcagtcgacaagtgcttgtcatacaagcctaaagaccggaattcggatccccgacagccacataaaaagccaagtgcagtggtgcatttctataatcccagcatgaggaggcgcagacagaggctccctgaataccactggcgagttgatcttgctgaattaataaacccaggagaacggagaaaccccgtctgaaagaatccagggggaaagtgacagggtgacaccttgtgttgatctctggcctctatgcacacctgtagacacagcacatacacatacaaacatgcacacactcatatatcacatagaagtatttgggaggggtctcatgggtgatagacaagtatcctaccattaagctacactccccccatgcccagttggccctgtcccaggggcaggagccatgtcattcctcccccaccaaggccatgaggggctcggcagctgtcctcagccccatccacgaatgtgctgtgcacacataacccccaccccccacccacacacagatacacagtcactgcagtgctcctcaccaaggcgggtgctacataggccccagggtagagactttggcataggatgatggtccctgagggcaggaggtggtctgtgagaggaggggctctgcacgggatggacccagatgaagagaacgaaccgtgctcaccttcccaccctgccttgtcttaccgccctccagcatatcaacaatgaacacatccacggggagaagaaggagttcgtgtgccgctggcaggcctgcacgagagagcagaagcccttcaaggcccagtacatgctggttgttcacatgcgcagacacacgggtgagaagccacacaagtgcacggtgagcctcctccccctgcagagacgcttggacacggctgggccctgtgtcccttgaccccttgctcttccttatggtcccagttagtgctttctaatgaccaataatattgaactggctatttgtatacttaaaaacatcttaattacatttatttatatggcagaggaggagaaaggggtgaaatagaagtcggagaagagcttgtcaggaccttttctccttccgtcatgtgagtcccagagacacatccaggcatcggggttgacagcaagcccctttatccacagagccatccccccagcccctatttgtacaacttctttgggaatcaatacttgttattttgttgcttggttataagaattatttttgtaaccaggctccagatcattatcaatcatacagtttttgcaaatattttttcacttttgtgtgttgtcttcactttcttgatagtttcctttgaagcataaaagcttgatttagcaaaatccaatttttagctgccaaatctaagaaatgattacctaacccatggtcacagtggcttagccgaccctcctgctttggttcttataagagtttggaaggagtcagggacaagcatagctcagatggtaagagtgctggcctggcatgtgtgagccctgatttccatccccaggccacatacactgaggtggtggtgtatgcttataaccccagcgcttgggacatggaggcagaagggcccgacatttaagaccatccttagctacactgagtttgaggccagcctgggcgctatgagatcctgtctcaaagataaaaacaaaacaggaactggagagatggctcagcatttcagagtgctcgctgttcttcccaaggatccaggttcaattcctggcatcaacatggtggcttccaaccagctgtaacttcagctctttggaccaggcacacatgtaatgtgcagacatacatacaaacaaagctcctgtacacatacaataataagataataagactatggagtaatccaaactttcatatgcaggtttataaaacaggtttataaaatagtgaaggactggacatcttataaatgtgtgcttttgttcatgtaaatatcacaaatacatacgtgcatgcacgctcctgtatttcacagtaaagctctcccaccaaggtctttgatgcgtccaagttacttttatactgcaaccctttcagtattttctagaaaagagggtaactgtcattactaaaacacatgctttggggtgcacaagtgggagtgtgtgccatgggggtgggagtgggagcagggtaggagatgcaggggagcccctgagtctgtctagctgcctgccatgcatctggagtgtcctatctgaccagtccacttctttccagttcgaaggctgttccaaggcctactctcgcctggagaacctgaagacacacctgcgttcacacacaggagagaagccatatgtgtgtgaacacgaaggctgtaacaaagccttctccaatgcctcagaccgcgccaagcaccagaaccgcactcactccaatgaggtacgcatggctgcgatatgcagaaatgcatgcagaggccctggcatgtataaatgcatcacccttgactagtggataaccatgttctagtttcatttctattgctgtggtgaaataccctgacaaaaagcaacttggagagaaagagactcacttcaacttagacttccaggttaaggtctattgtggggaagtcaggtcaggaacttcagttaatcatattcttcaagagcacaatgaatgcatgcatgcttacttgcttgatttcttgtactagattccatttcttttttcatacagttcacaacctcctgcctagggaatggtctgcccacagtgggctgggtcttccaatatcaattagcttaattaagacaatacccaataaacttgtccacaggccagtccaaaacaatctctcactgagactctctgcccacatgattctaataaggtaaagctaaccatcacaaaccatatgcaggtgcccctccccccaccagccacaagttctgcatgccagcaattctccctctatataccacagcctctcctccatgtagcaggtgctccataaagttcctttagcacactgacactctctgtacctcagttccttcgtgtctgtaacaattaccgatgcccctacaaggactgcagaaactgagataaaaacagaatggccttaatgctggatgtagtattgcgtccttttaatcctggtgctggggagctggagacaggcagatccctggggtgtgctggtcaaccagcctagcttagcatgatccaggacaatgagaggcccttctcaaaagtcaaggtgcatgatgccaaaaagagctctggtctcaaggctctgagcatgtcctaagagatactctggacaatatcccacagacatgcccacatgtcagtccaagacagacagtccctcacatgattctaaatagataaagtgaaccagaacaaaccacatgccaggtgcccctcccccacctgcttctctggccactgaatggattctgccgcagataaggaaaccaacactcagaggagacacaaccttcggtggtgtcacaggcctactggccactctgaagctatgaaaccatccttggccattgctttacctacaagtaggtatatgcctacaaaacagctgccctagtgttataggtacatgacgtatgtggcgggcaactcctgctgcagaggctaggctgcctgggctccactaggccatcatcggtctgcctggagcaagcggagcccctagacggcccaagagagagggaactcaacaggactccctagtccctgctcagttatacaatttctgtagttcaggcagaccaaagatagaacatttgtgtgtgtgtgtgtgtgtgtgtgtgtgtgtgtgtgtgtgtgtgtgtgtgtgtgtgtgtatgaaaatggtacatatgtcagtgcagatgaaaggtgttcatgtatataactactttatgctcatgtagatacaggagcatgtatatatgtctggaggtatttacatgtgtgtgttgtgcatttacatgtgtgtggtgggatgcacatatatagtgtatatagggccaagtgtgggtttgtgtggatatgaatgaaggtggtttatatgtgtatgtgcatgtgtgtatgtatgttatacatgtgtgaagatatatgcagggttagggacattaggtggtggtttctgtctgtagatttgagtgtgtgcaagccaaggacagaaagaagatgttcagatgctcaggtgtgccccaagtggacaggttacttaaagtttccttggttctatctgctaaggactatctgctaaagtctaatgagactgatatccttgtcttagttcccgggagcacgtgggtctttcctatactctttctgatctatgtaaccagcctcttttggcagttcttttgacactgtaacccccctgcatgcaagggtagtatacaaggcagatggaaggccaggctcttacggacttgacctggtgcactcaacccacaggccgtgaatgtgttagagcacttacccctgctccaggcctgccagggaacacggaatgacttcagaacagctatagcacccattcagagtttgtccttgggtcctcgtccataacccaggcctgactcttttcctagaaaccctacatctgcaagatcccaggctgcaccaagaggtacacagaccccagctcactccgcaagcatgtgaagactgtccatgggccagacgcccatgtcaccaagaaacagcgtaatgatgtgcatgtccgtgctccactgctcaaggagaatggggataatgaggccagcgccgagccaggtggccggggacctgaggagagtgtggaggccagtagcaccagccacactgtggaggactgcctacatatcaaagccatcaagacagagagctccggggtaagacagagctgggtggccagctggcagagcttggctctgcacgaggcccagaagcccaacctcctcttgaggatcctactagagcacccccttctaagaacaaaacgatgtcccatctcactgcagctcagctctcctcatttatcaccttgcaccccctcatgaaccctgtcttatttccttcaccttctctgacccagctcctgctgggcaactgaggctgaggctgggagatgcccttcctccaggccagtctgcacaggatgcatttgcctcttttccagtacccgggtgccactgtgggtccccagccctctctccctgtctgtgccctccccactctagcctgtgctccttctgttctaaccacctgttctttgtctccacctctttttcccaactgtacctcccctaaggatagacgctactgaggtgagcagaggaatggggtgggagcatccagggagagagggtgggctgggtgctgtttagtgctcctggctgggcagaggttgaactcgattttggagagacaggtatcaggtggcgctgtgggaataggtggaggtaggcagcaagaatgaggctggcaggtatgggaaagaagggagggtaggggtgaggtgtggagatcaagggagagcaggggtgtgtctaaactagatagagcaaagaactgtgaagggcaccatgattgttgggactgtctcccctaaactcagcgtgtagcactattgcatcttcccaaggaagagggaaatcatctgacccagagatgagcctcaaactactacatacagaatttgcttcccagcccagatctcaggcagcactggatgctgcagggttctgtgctattccatgtctgtctgtctgcctgcccaagcccagcccagcccagcccagagggagagccaaatagtctagtttcatttccgttgccatgataaagaccctaagaaaaagcaaagcagggcaagcatgcgatgaggatttgagttacagctctacattcctacccaccatttctagggaaatcaaggcaggaactcaagtagctaggcacatcacatccacagtccctagcaaagagaatagatgtgtcattgtctgcctgctgcttcgatcagaaaagggacacggttagacttaatgaccttacacaggcacacaagggacagtcttcaagtgcctctttaaagcggttccctgttccctcatgtccctgcccaagcatacagagcatggtaggagtgtggaatggtttacaggaccgggtgacttctcacgccctccgaccctgtgtcttctaccttgtccctacagctttgtcagtccagccccggggcccagtcatcctgcagcagcgagccctctcccctgggcagtgcccccaacaatgacagtggcatggagatgccggggacagggcctgggagtctgggagacctgacagcactggctgacacgtgtccaggagctgacacctcagccctggctgcaccctccactggtggcctgcagctgcgcaaacacatgagcaccgtgcatcgctttgagcagctgaagagagagaagctcaagtcactgaaggattcctgctcgtgggccggcccagctccacacacccgcaacaccaagctgcctccccttccagtcaatggtgagtgaggtgtgacagacccggtgggagagagcctggggcttttcctcctggctccttgcgcagtgtgactggctgcccacaatgaggcagatcagatgcttccaagtgcttggtgtcttattcaatcagagagctgaagaagcccacaaaaattgcaaaacagagaaaagctttattcagaatcgaacaaagcatgagcacatgccggtttacaagctcaagattcctgggtattgccctaggcttcctctaggaagtctaggaaggggaggtgctggttgctaatggcaaggtgtggatgatgctttgtgtttgattgacaggcttaggtgacataagccttacttgtttggacatgccctaattttaaccatatgcacactcaatcatacacaagtataacatgatgaatgggggattctccctaaaagttcattcaaaggatatagtttacattactgcatatgcaccccaaacaagtccaagctgggtcaacctggttccttggttgtaggttgtatgtctggtctccaaaggttcctaagggttggtagggagggagagatcaaagtgactgggttcttttgtttggagaggggtatggatggagctcagtggcgggcaagctgcaagtgtggaggtgctctcctggcaaaggggtgtgtgcactgtgatccaagtgatgcccaactactaagccttccttccacgcatgtgtctacttcagccctaccttgtgcagcatggaaaggaaacaggttcagagaggtacaggtacctcaatcaaacccagcagtaagtgagacttagctcaggtctgtgcagctccaatgtgcatgctgttcttcatgctgctgtcagcctctaaaagtaggctgtgtctccttcattatctagccattcagcatttagggcatcaaggcaaaggcttaaggaaagaagggcagtatgcttgccgtcccaaaggacccagggtcagagtcacatgcagagcaagccatagagcaccgacgcaccaccgatgtactgaggaggtgccttccatggggaacgagcaggtggcttctcagaggaggtaggcttgtgttcagcaggttcttttatctccaagagcatctctggagtgccgctgggcacatagacaccaggctgaccccctatggtggtgtacattgattggcacaccaccagccccactgttagaaggattcctgccacaagtctgtgaacactgcatgtctgggatctcttggattgcagacagctgcctgcactcaggtcatgactgttcataaggaaggtgaccacccgtctcagccctgaagtgctatgagaggccttgattggcctctgcaatcttgggctcacttcaactctgtctactctaagatcagtctatacagcatagagagaccctgcctcaaaacaaaccaaatactgcatgcaaagctcagttggtggagtgttagcctcatacacacacagccctaagtaccaacttcaattctcattaccaactcaacagcgtgtggtggtaactccagcattcaaaaggtagaagcaggaggatcagaggtttaaggtcatctttggttgcaggccaacctgggatacctaagaccttgagtcttcaagccagggccctcatgagccctgctgtctgtaacctcataggtacagatgaattttatatatagctaaagaaactggggtggtttctctgtgtagccctggctgtcctggaactcactttgtagactaggctgggctcagaaatctgcctacctctgcctcccaagtgctgggattatgtgtgccacttcacctggttttcagcatcctttcttacacccagaactcttctaccatcgagtgcctgctgtggacctggccttgtgattgggctccaggatcagtctggtcaagggggttggtagatgaactggttactagttctactacctctactagacaaggtgtagatgatcctttagttttgggaaacagatcagggagtctgggttctgcggagcacagcccttggcttcctgtgacccctctgtttttccccaggttctgtcctggaaaacttcaacaatacagggggcggtggaccggcaggactgctgcccagccagcggctaccagagctgaccgaagtgacgatgctgagccagctgcaggaacgaagagacagctccaccagcaccatgagctcggcctacactgtgagccgccgctcctctggcatctccccatacttctctagccgtcgctccagcgaggcttcgcctctcggtggcctacgcccgcacaacgccagctcagcagactcctatgaccccatctccacagatgcctctcggcgctccagtgaagccagccagtgcagtggcggtggcccagggctgctcaacctcacacctgcgcagcagtacaacctgcgtgccaagtacgcagcggccacaggtggaccaccgcccacgccactgccgggcctcgatcgtgtaagccttcgtacccgcctggccttgctggatgctcctgagcgtgcacttcctggtgcctgcccacatccactggggccacggcgtggcagcgatgggcctacctatagccatggtcatggccatggctacgcaggtgcggctccagcattcccccacgaggggccaaacagcagcacacggcgggccagcgaccctgtgcggcgccctgacccccttattctgcctcgagtgcaacgtttccacagtacccacaacatgaatccaggttcactgccaccctgcgctgatcggcgtggcctgcacgtacagagccaccccagcgtagacagcaacctgacccgcaacgcctactctcccagaccccctagcatcaatgagaacgtggtgatggaggccgtggctgctggggtagacggcccagggctagagtgcgacctggggctggtggaggatgagctggtgctgccagatgatgtggtacagtacatcaaggctcacaccggtggtaccttggatgacggcattcggcaggggtatcccacagaaggtactggcttccccgagaactctaagctgcccagtcctgggctacaaggccaccgcaggctagcagctgccgactccaacatgggtccttctgctcctggactcgggggctgccagctgagctacagcccctcctccaacctcaacaagagcaacatgcctgtgcagtggaatgaggtgagttctggcaccgtggatgccctgcctacccaggtgaagccacctcctttccctcacagcaacctggctgtggtccaacagaagccagcctttggccagtatccaggatataatccacaatccgtgcagagcagctccggaggtctagacagcacccagccgcacctacagcttcgaggagccccctctgcatcaagagggagctacacgcaacagcctcgacagccagctgcaggcagtcagtgcctgggtatgagtgcggccatgagcccgcaggccagctacagccaagcccacccccagctgagcccaaacattgtcagcggatctctgaaccagttttctccctcctgcagcaatatggcagccaagcccagccacctgggactccctcagcaaatggaagttgtccccaatgccaccatcatgaatggccatcaacgggagcacggggtccccaattcatccctggctgcggtgtcacaacctcacccagtcctgagctatccccagcaggacagctaccaacagggctccaaccttctgtcatcccatcagcctggcttcatggagtcccagcagaacgcgggctttggtctcatgcagcctcggccacccctggaacccaacacggccagccgtcaccgtggagtacgttctgggcaacagcagttgtatgccaggaccactggccaagccatggtcacatcagccaaccaagagacagcagaagctatgcccaagggaccagcagggaccatggtatccctagctcctcagccatctcaggacacagggcgggcacaagatcagaacacgctatactactatggccagatccacatgtatgaacagaatggaggctgcccagccgtgcagccccagccgccacaaccacaagcttgctcagacagtatccagcctgagcctttgccttcaccgggagtcaaccaggtgtctagcaccgtggactcccagctcctggagcccccccagattgactttgatgccatcatggatgatggtgatcactcgagtttgttttctggtgcactgagcccaacccttctccacaatctctcccagaattcctcacgcctcaccacaccccggaattccttgacactgccctccatccctgcgggcatcagcaacatggccgtgggcgacatgagttccatgctcaccagcctggctgaagagagcaagtttttaaacatgatgacctaaaggccctggctcctggcacaggagacctgagcaacactagccccttggaatatgagggtctagtctgttctcattgtcccaaagtgttaactaggcctgagaggggttgggcaatggccaactccaaatgacagctctgggccatgcccaggggtcttcttgcagatgttttaagaaaagattaaggggcatcctctctgctgtttggcctatttggggggggaggggacacccaaagtcttattcaaaaagaaactcgttcacatgacgcttgccagcctctggtgtttgtgagattcccgggttctggctcctttgcctctatcattcagctaatgagagagaactttggccaggggctttccaagtacacgcccaaagaggggaggggagccactctgggtttgaatctgagaccatgctggatattctctgctctgagaagatgagtttgccattctgccacctgggaggaaaagggattactgtttcccctggattcttccatgaagctcgtcaaggttgctcaccacggaggagaaaggcgcatcccccgggatattgtagtctcctcagttacttgctaacatctccatttccttaggtagagtgggaccagcagatttcctaaatggagaagaattaataaaacacgtattttactatggggggggggggtacagggtctctcctggcctgtttacagtgttctgaggtatacagtgaagccctccctgggaagaagacttgcgtctacatgccttgggttgctgtggactaggaataggcagggcctcgaggtggaagaggccttccccaggaaaaggaagtcatatgtttacccgctcctatttctccagtgcactatctgaccactctctcatgggagatcccagggctcctccacaccggctggtggccagcagacaaccctgagcgaccacctgcagcctccacactttctggtcccctgacctctaccctcctctccaggttatttggcatggaccagtgatgacatgcatggtttgtggttgagcggaaggttgaaggcattgattcttggactttgaggaactcttaactgaatttgcttgttcagtatggcctggccccagataagaaatggcatgtggaaactgactccaaaaagagtcagtcagagcgcactgcagggtgaacccatgcctccaccaccacagacatgtgcgtatcccaaacctgttcctttgagttaacagaaacttttgccaaccaaacctcaccaatcagagcttccttctggccatgaccttggctgtggtgaggagcttcttaacagagtctggaccctctgtgtcccagggcagcaaacttctctgtttacaacccagagacaggaccaactccaaatgacagctctgggccatgcccctgggtctctggctcttgtggtgtggactcattgcctgacatagaccctagcttcccattctgtctgtatctattttgtgtagacatcgtcttgcctgaatagactgtgggtgaatccaaatttggtccagccaaatttatattgccaaacatttttagctttttctacatgctataaattgagatgacatgctcaacttgtaaataagtcttttttgtacattaaaagtaattttttcataatttatcttgttgatctgcttttcccttgacagtagttaatgagaatccaggcagtaaatttggtgcatttgaacaaaaattaggctgtatttttttcataacagtgtcaaaactgactaccccaccttaacccagacaggcttaattcaaaatcatttactggctgtttgctttctgtcactttggggtgggggcagacagtttgccaagactgggatacgagtgagcttagcacatctgagtcaagtagctgaagtcccagtatgccagatctcaatacagacccaggcacagtctgtggtttctgtggtgatacccatttggagttgggggtgttttgtttacttcctcatgctgtgatcaaatagcagacaaaagcaacttaatgaggagggagggtttattttgggtcaaaattcaaggatacagtcagtctgtccttgtggggaatgtacaacagcaggagcgtaaggtgcgtggccacatgacatccacagattggaagcagaggaagacgatgctgatggtcagctcaatgtctttcattcagtctgggaccccaaccagtacgatggcactgcccatggttaaggtaggtcttcccagcacagtttacccaatctagataatccttcgctgacatgcccacaggcttattcccttgtttcctgatgatcctagaacccatcaggttgaacttgagattaataactgaagggagtgaagggtgggaaaggggacaggccaccaaagttggcaaaagagattgttaggcaggcaagggaagccctggatacatcgctaccagccttgggtgaagggccaggggagaagggctgtgactagaaccctgagcctaggaaagcttcctggcagggaaacaggaaaaaccctggatcagcaaattgacaagtcagccctgggcagtgatcgggcaaatttagcctcagaaggaggaaatatagcttggttggttcaaatccccagaacccacataaaaggtatgccagacacagtagtagcgtacctatggggagatggaatccaaaaccagactccccagctagcctggcctatgaagtggaaaagaaatccagagacccccttctcaaggtagaagggaagacccaacacacaaggttgtcctcggacctgcacatctacactggcagtgtgcatgcctacacacacacacacacacacacacacacacgtgtgtgtggggagagtgcaagtgcacacagattaaaaacaagccagaggctgtggtgatagctcagtgattaagagcatttgttgctcttgcaggagaccctaattcagttcccacacccatgtcaaaaggttcacaaccactgtaactttagctctagggggatctgacattctcctctgacctaggtactgtcatgcatgtgtacatatacagagacacgcggatatgtataaagttaaaatagagggctggagaaatagacagatgtaaccatctcactcttgcagaggatccaggttgggttcccagagcccacgtagtggctctcaatcacccataactccgtttccatggaaacgaggtattcttctaacttctttgagcaccaggcatgcacacaaaatactcagatacctgtaggcaaaatgctcagacacctccaataaatattaaaagcaaagaactttttaataagacaacacatgtagaggccagaggatagcctaagctctcatttctcaggcactggtccacttcctgttttagtcctgggtcttttactggcctgtaggctcagctggctggccatcgagcccagggtccacctgtctcatcctcaccagtgctggcattagcacaggccatcacacccagctatttatttatttattttaaatttttatttgattggttggttggttttgtttcgagaaagggtttctctatgtagcctggctgtcctggaactcactctgtagagcagactagcctcaagctcagcagcctgccttctgagtgctggaattaaaggcatgtgccaccatgtctgccttttttttttttttaaatgtgggaactttggtcctagagtttacaggcaagcactttcctgacagtcatcttcctagccctgagactgagggtctccacctcccaatgatcttggagcctttcagtccacagtggcagttgctgaccatggctcgctctcaaacatcacattagtttcccacacactgggtcaccttgtctcaaaagccataccgcatttcctttggtgatctctctctatagatatatttacttattgatgttccatatcagcctgctacagactatgtcttgaaggtctctaggcatccttcaagacatctttaaaaaaacaaaaagacagccgggcagtggtggtacttgcctttaatcccagcacttgggaggcagaggcagacagatttctgagttggaagccagcctggtctacagagtgagttccaggacagccagggctatagagagaaaccctgtctcaacccccgccttccaaaaaaacaagcaagcaaacaaaaacaaaacaaacaaaaatacccagggactcctggagcccaggatggcctcaaattaactatctagacgaggatttggattagataactatcttgaatttctgatcctcctaccttcccttctaatgctgggtttatagacaggtcccaccaagctcagtttgtgtaatactaggaatcaaacccatggtttcctgaatgctaagcaagaagtctacccaatgagctacatccctagcttatagacaaatcttcaccaagcatttctccacactggacactattttttcttgcccttttataaccatcagtgaatttccttatttttcatttcctagtctaggtgttatatataagaatagtcatctcccattcatgaccattctatatatgtgaaccttagcctattgagtactgccaaataaaagcagtgaccagcaggaagctttgatgtggctcagaagtggcagaatgggtgaaattacctgggtggccacagaagacggcctgtctctgttcctgaggacgtctaatgacaaggacattataacaggacagagagagcatgagaggcctcttcaggactggaccagggaccagaagcaaatcacagagctgggccagaaagcaactggctgggaaacatagataagaatgagagccccacatatcggaggaacccacccttccatcttcccaccaagcctttctcgtgataagaccacagcattagtgacaaactacctgataaaagcagctcaggaaaggaagggtttgtttgggctcctggttggaagcagaagcagaagctggtacgtacatcagaatcgggaagcagagaaagatgaaggctcaatgctccttttcattcagtgcagggttccagcccactgagtgatgccattcatatttcgggtacatctcaactaacctaatctggaaactccctcccagacatgcccagaggtgtgtctcctaactgaatgtggatcctgtcaagttggcagtactaataattatcacattcactagcatgaccagggtgtggtgaagcatgtctgtaatcccatccctcaggaggcagaggcagggcatcatccatagtttcgggggttcatggcctgcatagtgtgttccagtctagcagggctacaagactagctgatatagcagcctccttctatcctgcgggactgcctcagtttattctaagcctagaagacaaaaacaaccaagcacatacatatacaaattcacacatatacatacacaaacacacacatacttatacccatatacatacaaatacatacatacatacatacatacatacatacatacatacacacacacatacatacacaaacacacacagtgcagcacttcccaaccaggttctcaatacctttagttatcataaggcaaaaatcacataaacagaggcagacctgtaacccatatgaggttagacggtcacattgtctttgaaatggtaaaatacgtattttttagactgagaatcccagtatggagattgtaatggtgccttgtacgattagggagggaagtgactatctagggattctgggcaaggacacaataggtaaccgaaatactaaaactcatccagtgaaattggcgtggcggcgctcatccacaactccagcacaggatcaggagggccgaggtcctcaccggctacagaacagatctgaggccacaggctacatgaaaccctacctcagaataaaaataagatctgcaaatagcccaaagaagggaagtcatgggaacaaatagcaatccaaaacagaaaagaaggaaataaattaaggacaacagcaagcggcactaaacgcagtcccatcgataactacataaaacacaacagcctaaaagcttcaattaagacacacacagagagcggggccagagccttaaacatgcagctttaagacttcctataaagcggccatcgtcaagacagcagaattggagatggtaaagttacagatgggtggcatgggacagaaggcggtcagcagacatcaccagagactaaataatggctgttctgaaaggcttgtccagcctggaacccacgggctgcatgcatctcaggatagctatgatgcacacaatcataaatttacttaaatcattaggagtggtgtgtgtgtgtgtgtgtgtgtgtgtgtgtgtgtgtgtgtgtgtgtgtgtgtgtgtacttcatgagtatgaactttgtagatgatagaaccatgtagcaatgtcagaaagtcaggcatggggtctgggatttagctcagtgctagactgctttgtattaataactatctatcatatgagttatctggaaagaacaaaaaccctgggctcattcctcagctctgcccatgtacctctctctccattaattcatacacccacctgtccctcgtccatctgcccatttacctctcctccaccttccatccacccatcactcacccgtccgttcatgcatgtcttcatctctctctctctctgcctcagcttcccatccatctgtccatctgtctcttatctcagagggtgtctctgcctaggatgatgtttggggaaaggaaagcgtctatggggaaggaaccattgtgaatgcttccaggtcacagacactgaaccaaggtcatctcctgccatagaaagctgctatcaacccctcccaaattcacagtgacaaacaagggacgtctgtcctcaacaaacagcagagcctccaggctgggctcagtggtcctgttctgtgtgtggtcaccaaggagcagcagtgacccgggcaagagtcttcttatggtggtgtcagaaaactgaagacatacagggtttgcaagatctcttaagggcctagcctcagaacttgtgtgagccttgtggtgacgtcccaggcagacttgaccacatcagagtgtgagaaagagttctttgaggattcggtcactgagcctgaggaatgggcacacaggaatggtggggaagggcattctagataaaaggaacagtctgtgtaaatgtcctgaggcaggcgggaaggagcacagtagaagcaagccactgaggaaagctagcatgggctcagggagacagaggaggggctgaagagagagtcatagcctatttagagactagggaaagttcagtgccccccacggtgtcttctgacattagaaaggatttgtgaacaaggcccacatactgggaaactccatccaagttcagagaggaaccagacataaaagactgcctcgggccaccccatagcccatctcaggctgtcccaggcaactctacattccgtcacaggccactgcagggcctcagaaatggacagtggtgataggctgaagagtttacttggggtgaacccagcaagatgcagtgatggcttctgtaggaagagtcaggctggaggtggtcagggagtgtgctggttcctgtctcgttgcccattaatgtgctgtgacaactcacctgacaagaaccagcttgaggaagggttcatgtggactcttagtttgagggcacagtccatcatggcaggaagccatggcatgggtcacaccatccattgtactacgtaggatgcctggaaccacagagaacatcacttggctgtgtgggtcctcaaagaagacaggggtctccagagccttgaaaagacccagtgtctgatggtagactctaaatatgaggcccgagagaagaggagagcagggacagttggctaaggccagatcccaaggtaggaacttccacaggaaggcaggagacattagccagagaggctcattttatgggacacagaagccttgctctcctcttcctcctcttccaccaccaactcatcttagcacctcctctctgtctgtgtctctctctgcctctctctgtctctctctctgtctctctctgtctctcttatacacacacacacacacacacacacacacacacaccctcctctcccatcctaaatcccagccacaggaagtctccatacccactccagaacccttcacacacacccagcctttgcatcaccctcccagccgttgcatcagctcccccactcccgcccccagcctttgcatcaccaccctcacctcccagcctctactctgtacttgagtctctcatatagattcacaagcttgcatccctgtggtactgtcatgtgcatggaaatgaaagtcttcaatccaaaatgatgcgatggggcttccacacaggggagttggcttacagaactctgttccccttccccaccctggtctcgaaccaccattcttccctgtcagagcatcccttcaaacactgtttcctgcttagtgtccccgccccgacgaggtccgaaggctcactgatctttggacttcatcacctggcctcaccttctcacttcatttgatctgtacattctcgttactatgccaagtaaatggccagcaatgctgccttggggcctttgcatggccattcccatcgtttggaacgctttcccctcagacagccaaacgattcatacctttctcaggcttttgctcccataaccaccctacttaaacggttgggggcggtaggggtggggggatctgtggtagaacgcttgcctggtgtgtggaaggctctgggtttgatctccagcaccagaaagaaataaactattacctgctatgcttttcccgaaagcacagatggccttcaaaactgtaattcacacctactgaatgagctcactggggatgggagcccggcgagcttgtgtgcaggccggctgggaggagggaaacgaaggcagctggtcacggagctctccagaagtttgccaagatggagaaagaacaatagaaggagaggcttcgatggtgggggtttgtgtgcttgttttgtatcctgtgtagccaaggataacccaaaactcctgatcctcctgctggcactgcagatgggtggtgccatacctaagttagatcaagttgaggactgaacctagagtcctgtgtgtgtaagacaagcactgtaccaacaaagccacatttccagcccttggtgatgcgcttcaaaaggaaagagaagcatgtgacgattttttagactcccaataagaggacatagatcccagtagaccatgtgagagataactgaagtgctcactgggagttagcaggagggcagcgtacggagaaggtgctgggcaggatgggcatgtcctgttggaactagagatgaagatagagtacaagaggtcagggggttggaactgaggaggaaaagagctggctgtcctgtctctcaacacaggagtcaaaattgtgtcccgggagaaagaagaagcaggggcccagaagaggctttgagactgagacagcctagaaaatgctgttctagcacagagaaggacgctcatgtggactgaagacaaggctcagcgggagccttgttccaactggtatacaggtcaagtcgtggaggacgtctgaggcttgtgttatcactggcctggctgcagcctgagtatgggctgccgaagggggtttgaacacatgccaggcttgggaaaagtccatctgcccgtgtgggacgatgtccgggaacaagagatgtctctgactcttatttgggccttattggggaacaaggcttctttgggggagctgccccactccgtgcttctcagtgcaacgtttttactaggtgcaaggagagccgcgggcgacccgtggcacagccagctgctgcggctcggaggtaattccccagtgtcctttattgcctctacgcggtgggggtgacacagcctctgctttacgatctggcagcgtaggctcaaccagcacagtggctgtcaataagggctgtgttttatatcacaggccgcacgatttatgggggggcccagcaccctgcagacagccgtttggccagggaagaaaatgacctaatccttaagaaatttggaagctagaaaacaaacgtgtgtatgttgcgcacccgcgagcacgaccgtggctgtatgtgccagctttgtctgcggacttgccaggcactggaaaacagaaatagctgttaaatacgctgactataaaacttaaatgaaatcaaatgactcacttcctgctgcatagggcctttgcgtcacacccgatgagcagggttttggggagaggtgggtcatttcctaccaaatcaacctgcattcctttctccccaggtaagccatgctctttgcaaaacatggggtaatgtctccacttggatatgcccatctcagtactgaaccacctggttttggtctgcctctgagcatgcccaactgtgtgtgtcagtgtatggagtgtatgtgtgtggatgtgtgtgtgtgagcacctatacacacatgtgtggtggccagagggtcatgttgagtgggccgttccatctctttccaccctagcccttgagacagggtctttcactgaacctggagctggcagctggtaagccccagccatccacctgcctctctccttccccactcagtgctaaggttacaggctaagcagtcacttctccacccgggtccagcctttggacagggtgacatgatgtggttacctgcaaagttcaactgaagtcatttttttaaagtttcataatgtttggagtttgggttaagtaggtctcattcctagttatccttggccatctgtgctctgcacactatggactgggcatacctgtgtcaggtttcagcttctgatgagtgggtaccagtcatctggcatggcatccagggcacaactgcactggggtaccacggtaggggctccatccctggctgttgaattaaagctcagatcaaggcatgatgatgcgtgtgaatcatcacgtcacataggagctggagggtcagaagttcaaagttttccttggctttatatcaagtttgaggccagcctgggctacatgagacttcttacatgggtcctccggatcaaactcaggtccccatgcttataaggcaagcgcttcctgtctgagccatctccccagctcgaggttgagcccagctcctgcatgtatgctatcccatttaaccctaggcagacccttgagagggagctgtgactgtgctcctgcagctgagaaaacaggcttcaggataaacatttgcagcactgcctgggtggagaccccagacctgccctgagccagacctctgccctcaccccgcaattcccccaccagggcctgaacacggtgcatggacgtcccaatagccctgtaagatggcgatctctactctcagacagaaccttgggtatggtaaatctcagactggtgcaaggccctccagtgagctcagactaattgccatgctcctgaagggcagggtgagcagcggtgagacagaactcacaaccccacatactattccttatgagccatctacattgggttttgatacctcatattaactatgtgtttaaatataa

SEQ ID NO: 1055 - DNA, 6229 bp, Mus musculus
gttcctcagcagctcctgccggctttccacgcgcctttgccgattgacatgagacaccaggagggaaggtaccattatgaccctcactctgtccacagtgtacacgggcctcccaccctaagtggcagccctgtcatctcagatatctccttgatacgactttctccacaccctgctggccctggagagtcacccttcagcacccaccacccctacgtgaacccccatatggagcactacctccggtctgtgcacagcagccccacactctcaatgatctctgccgccaggggcctcagccctgctgatgtggcccacgaacatctgaaagagaggggactctttagcctcgcagccccaggcaccaacccttcagactattaccaccagatgaccctcatggcaagccaccccaccccttatggggaccttctaatgcagagcgggggtgctgctagcgcaccccatctccatgactacctcaaccctgtggatgcatcacgattctctagtccacgtgtgaccccacgactgagccgcaagcgggctctgtccatctccccgctctcagatgccagcctcgacctacaacgcatgattcggacctctcccaactcgctggtagcttacatcaacaactccaggagcagctcagcagccagtggctcttatggacatctgtctgccggtgccctcagcccagccttcacttttccccaccccatcaatcccgtggcctaccagcagatcctgagccagcagcggggcctgggctcagcctttggacacacaccacccctgatccagccttcacccaccttcttggcccagcagcccatgactctcacctccatcagcaccatgcctacccaactcagcagcagtagcagcaactgtctaaatgatgccaaccagaacaagcagaacagcgagtcagctgtgagcagcaccgtgaaccccatcaccattcataagcggagcaaggtcaagactgaggctgagggcctgcgtccagcatccccgcttggactgacacaggagcagctggccgatctcaaggaagacctggacagggatgactgtaagcaggaggccgaggtggtcatctacgagaccaactgccactgggcagactgcaccaaggagtatgacacacaggagcagctggtgcatcatatcaacaatgaacacatccacggggagaagaaggagttcgtgtgccgctggcaggcctgcacgagagagcagaagcccttcaaggcccagtacatgctggttgttcacatgcgcagacacacgggtgagaagccacacaagtgcacgttcgaaggctgttccaaggcctactctcgcctggagaacctgaagacacacctgcgttcacacacaggagagaagccatatgtgtgtgaacacgaaggctgtaacaaagccttctccaatgcctcagaccgcgccaagcaccagaaccgcactcactccaatgagaaaccctacatctgcaagatcccaggctgcaccaagaggtacacagaccccagctcactccgcaagcatgtgaagactgtccatgggccagacgcccatgtcaccaagaaacagcgtaatgatgtgcatgtccgtgctccactgctcaaggagaatggggataatgaggccagcgccgagccaggtggccggggacctgaggagagtgtggaggccagtagcaccagccacactgtggaggactgcctacatatcaaagccatcaagacagagagctccgggctttgtcagtccagccccggggcccagtcatcctgcagcagcgagccctctcccctgggcagtgcccccaacaatgacagtggcatggagatgccggggacagggcctgggagtctgggagacctgacagcactggctgacacgtgtccaggagctgacacctcagccctggctgcaccctccactggtggcctgcagctgcgcaaacacatgagcaccgtgcatcgctttgagcagctgaagagagagaagctcaagtcactgaaggattcctgctcgtgggccggcccagctccacacacccgcaacaccaagctgcctccccttccagtcaatggttctgtcctggaaaacttcaacaatacagggggcggtggaccggcaggactgctgcccagccagcggctaccagagctgaccgaagtgacgatgctgagccagctgcaggaacgaagagacagctccaccagcaccatgagctcggcctacactgtgagccgccgctcctctggcatctccccatacttctctagccgtcgctccagcgaggcttcgcctctcggtggcctacgcccgcacaacgccagctcagcagactcctatgaccccatctccacagatgcctctcggcgctccagtgaagccagccagtgcagtggcggtggcccagggctgctcaacctcacacctgcgcagcagtacaacctgcgtgccaagtacgcagcggccacaggtggaccaccgcccacgccactgccgggcctcgatcgtgtaagccttcgtacccgcctggccttgctggatgctcctgagcgtgcacttcctggtgcctgcccacatccactggggccacggcgtggcagcgatgggcctacctatagccatggtcatggccatggctacgcaggtgcggctccagcattcccccacgaggggccaaacagcagcacacggcgggccagcgaccctgtgcggcgccctgacccccttattctgcctcgagtgcaacgtttccacagtacccacaacatgaatccaggttcactgccaccctgcgctgatcggcgtggcctgcacgtacagagccaccccagcgtagacagcaacctgacccgcaacgcctactctcccagaccccctagcatcaatgagaacgtggtgatggaggccgtggctgctggggtagacggcccagggctagagtgcgacctggggctggtggaggatgagctggtgctgccagatgatgtggtacagtacatcaaggctcacaccggtggtaccttggatgacggcattcggcaggggtatcccacagaaggtactggcttccccgagaactctaagctgcccagtcctgggctacaaggccaccgcaggctagcagctgccgactccaacatgggtccttctgctcctggactcgggggctgccagctgagctacagcccctcctccaacctcaacaagagcaacatgcctgtgcagtggaatgaggtgagttctggcaccgtggatgccctgcctacccaggtgaagccacctcctttccctcacagcaacctggctgtggtccaacagaagccagcctttggccagtatccaggatataatccacaatccgtgcagagcagctccggaggtctagacagcacccagccgcacctacagcttcgaggagccccctctgcatcaagagggagctacacgcaacagcctcgacagccagctgcaggcagtcagtgcctgggtatgagtgcggccatgagcccgcaggccagctacagccaagcccacccccagctgagcccaaacattgtcagcggatctctgaaccagttttctccctcctgcagcaatatggcagccaagcccagccacctgggactccctcagcaaatggaagttgtccccaatgccaccatcatgaatggccatcaacgggagcacggggtccccaattcatccctggctgcggtgtcacaacctcacccagtcctgagctatccccagcaggacagctaccaacagggctccaaccttctgtcatcccatcagcctggcttcatggagtcccagcagaacgcgggctttggtctcatgcagcctcggccacccctggaacccaacacggccagccgtcaccgtggagtacgttctgggcaacagcagttgtatgccaggaccactggccaagccatggtcacatcagccaaccaagagacagcagaagctatgcccaagggaccagcagggaccatggtatccctagctcctcagccatctcaggacacagggcgggcacaagatcagaacacgctatactactatggccagatccacatgtatgaacagaatggaggctgcccagccgtgcagccccagccgccacaaccacaagcttgctcagacagtatccagcctgagcctttgccttcaccgggagtcaaccaggtgtctagcaccgtggactcccagctcctggagcccccccagattgactttgatgccatcatggatgatggtgatcactcgagtttgttttctggtgcactgagcccaacccttctccacaatctctcccagaattcctcacgcctcaccacaccccggaattccttgacactgccctccatccctgcgggcatcagcaacatggccgtgggcgacatgagttccatgctcaccagcctggctgaagagagcaagtttttaaacatgatgacctaaaggccctggctcctggcacaggagacctgagcaacactagccccttggaatatgagggtctagtctgttctcattgtcccaaagtgttaactaggcctgagaggggttgggcaatggccaactccaaatgacagctctgggccatgcccaggggtcttcttgcagatgttttaagaaaagattaaggggcatcctctctgctgtttggcctatttggggggggaggggacacccaaagtcttattcaaaaagaaactcgttcacatgacgcttgccagcctctggtgtttgtgagattcccgggttctggctcctttgcctctatcattcagctaatgagagagaactttggccaggggctttccaagtacacgcccaaagaggggaggggagccactctgggtttgaatctgagaccatgctggatattctctgctctgagaagatgagtttgccattctgccacctgggaggaaaagggattactgtttcccctggattcttccatgaagctcgtcaaggttgctcaccacggaggagaaaggcgcatcccccgggatattgtagtctcctcagttacttgctaacatctccatttccttaggtagagtgggaccagcagatttcctaaatggagaagaattaataaaacacgtattttactatggggggggggggtacagggtctctcctggcctgtttacagtgttctgaggtatacagtgaagccctccctgggaagaagacttgcgtctacatgccttgggttgctgtggactaggaataggcagggcctcgaggtggaagaggccttccccaggaaaaggaagtcatatgtttacccgctcctatttctccagtgcactatctgaccactctctcatgggagatcccagggctcctccacaccggctggtggccagcagacaaccctgagcgaccacctgcagcctccacactttctggtcccctgacctctaccctcctctccaggttatttggcatggaccagtgatgacatgcatggtttgtggttgagcggaaggttgaaggcattgattcttggactttgaggaactcttaactgaatttgcttgttcagtatggcctggccccagataagaaatggcatgtggaaactgactccaaaaagagtcagtcagagcgcactgcagggtgaacccatgcctccaccaccacagacatgtgcgtatcccaaacctgttcctttgagttaacagaaacttttgccaaccaaacctcaccaatcagagcttccttctggccatgaccttggctgtggtgaggagcttcttaacagagtctggaccctctgtgtcccagggcagcaaacttctctgtttacaacccagagacaggaccaactccaaatgacagctctgggccatgcccctgggtctctggctcttgtggtgtggactcattgcctgacatagaccctagcttcccattctgtctgtatctattttgtgtagacatcgtcttgcctgaatagactgtgggtgaatccaaatttggtccagccaaatttatattgccaaacatttttagctttttctacatgctataaattgagatgacatgctcaacttgtaaataagtcttttttgtacattaaaagtaattttttcataatttatcttgttgatctgcttttcccttgacagtagttaatgagaatccaggcagtaaatttggtgcatttgaa

SEQ ID NO: 1056 - protein, 1471 aa, Mus musculus
MRHQEGRYHYDPHSVHSVHGPPTLSGSPVISDISLIRLSPHPAGPGESPFSTHHPYVNPHMEHYLRSVHSSPTLSMISARLSPADVAHEHLKERGLFSLAAPGTNPSDYYHQMTLMASHPTPYGDLLMQSGGAASAPHLHDYLNPVDASRFSSPRVTPRLSRKRALSISPLSDASLDLQRMIRTSPNSLVAYINNSRSSSAASGSYGHLSAGALSPAFTFPHPINPVAYQQILSQQRGLGSAFGHTPPLIQPSPTFLAQQPMTLTSISTMPTQLSSSSSNCLNDANQNKQNSESAVSSTVNPITIHKRSKVKTEAEGLRPDLGLTQEQLADLKEDLDRDDCKQEAEVVIYETNCHWADCTKEYDTQEQLVHHINNEHIHGEKKEFVCRWQACTREQKPFKAQYMLVVHMRRHTGEKPHKCTFEGCSKAYSRLENLKTHLRSHTGEKPYVCEHEGCNKAFSNASDRAKHQNRTHSNEKPYICKIPGCTKRYTDPSSLRKHVKTVHGPDAHVTKKQRNDVHVRAPLLKENGDNEASAEPGGRGPEESVEASSTSHTVEDCLHIKAIKTESSGLCQSSPGAQSSCSSEPSPLGSAPNNDSGMEMPGTGPGSLGDLTADTCPGADTSAAPSTGGLQLRKHMSTVHRFEQLKREKLKSLKDSCSWAGPAPHTRNTKLPPLPVNGSVLENFNNTGGGGPAGLLPSQRLPELTEVTMLSQLQERRDSSTSTMSSAYTVSRRSSGISPYFSSRRSSEDLGGLRPHNASSADSYDPISTDASRRSSEASQCSGGGPGLLNLTPAQQYNLRAKYAAATGGPPPTPLPGLDRVSLRTRLALLDAPERALPGACPHPLGPRRGSDGPTYSHGHGHGYAGAAPAFFGPNSSTRRASDPVRRPDPLILPRVQRFHSTHNMNPGSLPPCADRRGLHVQSHPSVDSNLTRNAYSPRPPSINENVVMEAVAAGVDGPGLECDLGLVEDELVLPDDVVQYIKAHTGGTLDDGIRQGYPTEGTGFPENSKLPSPGLQGHRRLAAADSNMGPSAPGLGGCQLSYSPSSNLNKSNMPVQWNEVSSGTVDALPTQVKPPPFPHSNLAVVQQKPAFGQYPGYNPQSVQSSSGGLDSTQPHLQLRGAPSASRGSYTQQPRQPAAGSQCLGMSAAMSPQASYSQAHPQLSPNIVSGSLNQFSPSCSNMAAKPSHLGLPQQMEVVPNATIMNGHQREHGVPNSSLAAVSQPHPVLSYPQQDSYQQGSNLLSSHQPGFMESQQNAGFGLMQPRPPLEPNTASRHRGVRSGQQQLYARTTGQAMVTSANQETAEAMPKGPAGTMVSLAPQPSQDTGRAQDQNTLYYYGQIHMYEQNGGCPAVQPQPPQPQACSDSIQPEPLPSPGVNQVSSTVDSQLLEPPQIDFDAIMDDGDHSSLFSGALSPTLLHNLSQNSSRLTTPRNSLTLPSIPAGISNMAVGDMSSMLTSLAEESKFLNMMT

SEQ ID NO: 1057 - DNA, 219087 bp, Homo sapiens
atggcaggtggtagacttccttcagggatagctggagttctgctcttcagtgtgttttaaaaccagaaacccctgagcaggccttctttggtttaagtgccttctgtgtgtggggtgcagtactagatgtttttttgccatgaactcattcatagtaatcctggagcatcaaattgttagctccattttccatgacaagataactgaggtgtggcgaagctgagtcagttgcccacagtttgcagcaagaggctgacccaggcttcagatgcagtatgcaccactgcctctttacagcttaaggtggtgagacctccatccctgggaggatattcactcagagcctggatgacagtgcctagaatactctgggtgagggtttctcaactttggcatcatggacattctggttgcataattctctgttgtgggaactgtcctggtcactacaggatatctaccagcatccctggtctcaacccactggccaccgctggcgcaatttggagacagtcaaaaatgtctccagatattgccaaatgtcccttggtggcaaattcactcccggttgagaactgctgctgtagaggattcctgagtagaacaggaggttgactgcaggctctcttacaatccctgggacctccatgaggctcccctacctggtgggctcccttggcagactgtccccatcagtgggccattgattggaaagacttgttggggaggccatcgaaaggagagggggaaggagcaagcagcacactgcaaagagtcatgggatgcaggctcaggagaaagcctggagcacctcttccatgctcagacccaaatttggggcacacagctttacaataatcagctctggggcaggggaactggctcccagtaatgaccttgcctagcagcctcatgaccaagagacacctaaacctgtgacctcctctgcagcttcctgccgtcttggagggctctctaggaagtctcatgtggcaccctggcttcccatatgggctggggacatccttgagtatctttccagggacagtcctggccaaggaacccagagccaagcccacctgtggcacctggtctcacaaagccaggccacagtgggggctggcagggagaccatgattggatttgcaggctccgtgtagactgggctttaaagagcgttctcatttcctctccggaagccttcaaaaggccacgggaacaaaagaggcttgattgattgtgtcttggagagagtcatcgaaaggagagggggaagagcaagcagcacacggcaaaggcacttaattctgcacacagtgtcatgccaagaaaccacgaagtgcaggaacaagcaggagacattttccttttatcagtagggtgtgtccttagcggtaacagccagggacagctggcagcacagagtttttggcaccttgctttcctcctcctcctccctccatccctctccatactatccacgttgatttaagagaagggaactttttatatgaaaaccacttaaagtctgatcttattccagggcagtttgcatttcaatcggttgctcttgaaaactagcaagcttcaaagaagtgactgtccagtggtagaatttcaggtggggagtcagagtgatttttgtttagccaatgagatctgactggcaccttccaagataccagcgacgagctaggctgcggcttcggcttcgtgtgaggctctctggggtcagttaaacatcccgttaccagctgtctactgggtggcagccactgggggacatggtgtgcgggggcaatccaggagacagctgactttagaacactgggttcactctgatggccctcactcatggcatgcttactggatgccaactgtgtgccaggggcctgggaatgaaagtcaaatatctgagccatccagtggaacaggcagtgaagcacactgtagaagcttcacccagtgctgtgctgtgggtctcccaggctaataaggggccatgtgggagcaccaggcccttgcctggggcaggagggctgggacacgtgtgctgggtggaagagatcccagccttagctcttaggagttcatcagacaggtgttttttgaaggggaagggcatgaatgcaaaggcctgacaggcagtgtctgggggttgcaggcttctagaaataacataaagggcgagtcctgagttggtggcaagtgaggctgagggggcagggagggcacaggccttgggggttttgggggcccagataaggagtttgaatgtcattctgcagacagtggggagtcccgaggggtaagcacacccttccagtctgccggacacttgacttccaggactcagagctacaggcttccatgcttgccctgcctcctgctcgccccccagacacagcctccatctgctgtggtcctctctgctttagcaggcctttctggaccggaactgttcttcctttgaaaatgctcactcatccctgcctccaggaaaccttccttgactccctcaggttagcaagactggtagccccccagagcttatccctgctaggaggcttattctgggttggcacggcctgtttcctctgatgccggtctccccaccccacacctggactggaagctctggggcggtagtactgtgtttccctcacttctgtggtcaaggatggagactcaagattggcacacagtaggccctcaggaaacctgtgccacccaaataaagaacgtcgagcttgtctcaagtcacggagctggtcaaaccctcctggcctccttgagccggcgcatgtccaggctgcagcagaccacattattggatccgggtcccagacacctggcctgggctgcgatgaggtggctgccaggagggagggagggtggctgagggcatgtggcctcctgggcatgcagaggaaggccagggcctgggagagactggaccaggcaggagcgaggcttatccagggccggcttagcacgtgagctacctcctacctcatcatgaagatcccagctgaaggcagggcactcctgttggcttcattgcaaggaaaaagtggtgttctactggccagggtggtgctggctgttggttgctggcagacttggaggaaagccggtggctgaggctggcagaggcacagacagaagggctgggtgcaggcatcacctgggaggtgtggggagggctgcagctgggcaagttggagcaggagaccaaaccaggagatgccagggccacacaccagcccggttctccctggagcctcgagaagcagagctaccaccctggatctgcagtcagcactcccacccctgccctgcccctgccccaagcccagcaccacccatggagagggtgacctcaggccttggagattgctggctcgtggctgcaggtggcttggatccatgcacttggatcctggtatgctcccctcacatgtcaaaattcctgtctccatccaatcatggcataacactgtactccctgggggtccagcctgcctatctcacacccagagttgcactgccagtctgggctgggatagcgatgtggttaactgcaaccaactgctgtggttataaaccaggtaaggggcccagtgacagccccgctgcatcattggcaaaggactgcttgggggctgagctgcccgggggctggatgagatgacccctggaggcctttctgggtgccagactctgtcataagagggagaagacagaggggttagaaacacgtggtctgggcttggggtggctcctggcaaggcagcctcacaatcccaggatccgtaagaggacaaactcagaggaatcaaaacgcagctctccccaccaccctggacgggtctcagcgagtgtcagagcccatcgccaggttctgaggagcagtgtgatgggccaatgggaggctcctctccctgtagcttgcccagagtcctgccaaccagacagggtcccaggtcagcccagctcctttctcaagactttgagacttggtgtcggttggatcacattgtttgaagaggtgagatttgtccttgatctgcagacatctcccaccaccgccatcatccctgctgtttgggtcctaattggaagagcctggaaaggccacctgcaccattcccctgaccccaaaataccacccccaccctccaaccccccgcccaacctgcaattccactgagaaaatagctcttttgagtgtgtcagtgctcaaaaagcgcttttaagagataaacacttttttattcatcttgaaaatggttgtgcttagagctcagcaggtacccagttaatatgtataggcttcagtgctaagtactatgcatggcaaatcttttgctctcaaggggtttacaatgtaagggaaggaaggcattcttatgcagtgctggcaaacactgcccatggcagacagtacaagttgactagtgtgcctcctgcagcagacattagaagtcgattactgcacttttcctgacctaagagatagcctgatgccttctccaacccagccctcccttaaaggtgcctgtgggtctcagggtctagaagctgctcaccacgtggactttgtggggcattgaagcctgaggggatgctcggagaagaagaggattcttgaagacttgagtgcctgagagcatttatgtgttcagttcgtctctgagtcagtcaacaaacattgatggtgtctgtgtcgagggtggccataaagggacacggacacgtaaacatgtagttaaaacacaatgagataggagccttgaccttggcaggcacacaggcaagacagacccctgcctggcctggcagggggtggtcccagggaggcttctctgagggggtgtcatagtgggtattggggaactagcattccaggcagaggaaccgcgtgatcagagtcacagacagcatgactgcggtggaatgggggtggggcagggaacctgggggtgcagatcctgaggcagggccttggggccatgacagcgacttggaccttgtcctgtgcgcactcactgccttcatggtccttcgtcccctctcagagtctcctgcaaggattttccaccctcagtggcccttggtccttgcccccacccccaactccctgccttctcagtcttggattaagggggccttggcatgggtctgggtgcctgtggctcccgtgtgccaggctactggggtctgtttctgatgtctgctgccaccctgggcccctgagaggccttcaccccagccctcagcctgcccggggcagtgtgattttccctcctcagggcagaggccagccttgtttttcctccacactcaggaatcgcgcttcaggaatacacaaagcagctgttaaaatatctgggtctggcgggccggccacacagtgggccccttgttccccttgcagacagcggcctcagagcacgtcccaaccctctgctgggtcagcggtgctgggggagtggtgtcagggagagaccctggacctctaggcttcagggctctccagggaggaaggtgatggacaataggaatttagaaccgagtggaacaagcacattacaaacagatgccaacccgagagtttagatgtcagactgtagaggcgctggcaccagggtgggtggaggaggatgcctggatgggactgtcgtgtcaattcttggacagagccttctgttggtggggcagcctccaggcactgctcaggggcaggccttctccagctgcagggatgataaggccaggcctgtgtgtgccaggccccatgtgagacattctgtttatccccacttaacagatgaggaaactgaggcttagggagaagttgattcttgtcgacagttcctgacagagctgggaggtgaacatggccattccttctccagagtctgcactcactggcctccagctgaatgtgacaaccactgacgtgtgcacaggtggtgtcaaagttcagtcacagcacaaagaggttggtgagctctgtctaggactctgggaaggagggtgtgagagcaagctttctggattttaaagcatggcatcctcggtagagcagagggaagaatgttcctggcaggaaggcatggggattggagagggcctgctggctttcagggagtaaatcccagtggaaacaaacgaagtcttgaggccgtctcaaatgtcaacctcaaagtaggtcttacccacagcttcccagagggaaaaagtcctcctgatactcatcaactcttatcggaggctggctgcccctggaggggcctgcatttcccattggggccctccctggcccctgttccagcccagcaagtcagtgaattagggttaattatctgttttcctggacaccagcaggcccaggagctgggcaaattaggggagcttttgtacttggaaaaacaaattcaaggagcgataaagaagcaggtgcacctgctaggatggggattttgtatggtgcccacccctggccacactgggagggtgagggctttggccaccccctcaacttgcaggcccctgggctgcatcccctgaaagaggtggggacagcaggcacaggctggccaggctgtgctgcagaagcgtgtcagacacccaggggctggaggccttcctaaacttcagtctcctcctagcctgccctccccagataccctgacagcccctatggttccccttcaatctggcttatcacttatttctttctttctttttttttttttttttgagacggagtctcactctgtcgccaggctggagtgtagcgacacgatctctgctcactgcaacctccacctcccaggttcatgtgattctcctgcctcagcctcctcagtagctgggattacaggcgcctgccaccacacctggctgatttttagtagagacggggtttcatcatgttggccaggctggtctcaagcttctgacctcaggtgatccgccctcctcagcctcccagagtgctgggattacaggtgtgagccaccgcgcccagtctcacctacttctgtctccctgtgggaacgctttttttttcttgccttagagtgtgccaagggcttctccctccctttgctcatgcagttcccagaccctggagtgctcttccctttgtgctctccgggccaagttcaggaccctttcattctctgactggaagccacagggcagactggatggtcaccaggaagcctcctctgacctcctcaggtagcccgcccttgtggagctcccacaagtagaaactcactgctgcttatttgacatttagcatatactgccttggactttgaagcactctctacacaagtgcctgcctcacaactctttacatgtgtgtctatagctgtgcttttataccttttgacacccctataataattctggagcctggcaggcatctgtgcatacaaaggagttggccatgatggagaaagtagaaaactagaatccagcagacatgcactggcccaccagcactgccgtatcttagctgtgtgacttcggggagcttacttatcctctctgggcctctgattttaagtgaaagcaaggttcgagatattggcccagtaggagtagctgctgtgaatggtgaaattacttgaggagaggagctagccagctcgggacacctatgtgtgcttgaaggttttgttgtctttctctagtcatggggctcccggtgcagcgacaccctaggcagaggagggggtctaaggaaggacagagcagttcaagaggacccttcttcctctgagtcaacatgggaaccatggatcccaggggatttcggaagagcgatttcttttcttccagatgtgtctcccttcgttgtcctcacagcctactgggtaccaggtggggtggtgggccatgcaccaaatccatagagaaacaggggggtctgttgggagcagtggctgtgcactggtgcctcacatacatcgccaccttcaagtttctggataatcttgctgggggtgcatccccctcactgtctgtgggaagccaaggtcaaggttatggagcctgaggggcatggggctgacccagacaccatggccctgcctccccgcatctgaccagtccaggcatcatttatagggtctgggctcccctcctgagtttgccatctccccaaaggacccagagtggaggctgggggctgtgggaatccctggctggagtggtggaagagggaccagcgcaggtaggagcttgcggttcccctcccagtgtggaatggctggaagagggggagtcagggacaaggcctttgcacagctgcccacccgtccacactctggaagacccttcacaccttcctgagctctgcctggccccagtcctggagctccttgttggtgctgctctctggggctctgcagagctgttatcctgctgggccctagtgaagccatggcaggcttcggtttcatgtacagtgatgggaaggtggacagagaaggcagaaactggtgctgcctaggcctcagaccccacaggcaggtctgaggagctggtggagtccctgactgtccccccagggccctgcaggcaggtgatcttttcttggagaagaagaaaatgggagaagctgcccatgtggggcagctgctataataggtgttacgggccatgctgggaaggctgactgtcttcccagtaccctgggagggagggtactctgcatcactggggagcaaactgaggctccgagaggggaagtaacatggccacagacacacagtggatgcagactatgctggtccaggcacacatgcatctctcattgtgggagaattcaatgcctcatgttttaaaataggattattttgccgctggcagtaaaatgccagaagtcctggggaacccttacgttccccacgtccctatctccttcagggtggaggagtgagtgtaaatttgtctggatgggacagtggggactgacctgaggagtcagagcccgctttgctcctaggctgccagccttggcattgtggcactggactggtgtccctgaggtcattttcccagtggagacagtggtgtgaggggagaggaaaggactggtgcccagctcctggtggatacaagacagagtcctcagggcctcaggccgtgagtcggctgcttcccttttagctgtcatgaggttagaatgacgatttcccttaatcagggtggcggtgtgctcttcactctgggaaatttcactttttatctcattggatcttaaaaataagtctgtgatcaaggcagggcacatgtttatctctcatgtatgtgcatgtgtttgcctgggtctgtgtccttgtaatatatacatgtgcatgtgtgagtgttcatgtacctctgcatgtaactacatgtatcctgtatgtgtgcacgtgtgtggctgcatatgtgctgtgagtgtatgtgtgatgcaggtgaccatgtgtgactttatatatgtgtgtgcccatgcacacgtctgtgactttaatgcggtgtgcacgtgtgtgtgtggcctgcgtgcaggtgtatgcatgtgtgtggctgtgtatatggtttgtcggcgtatgttctgtgtgctgtgtgagtgtgtgagcctgcgtgtgtgtgtgcatccatgtgtgcctatgcgtgtgggtcctgggcacgcatgccgcacgactgagatcacagcagaggtgagaacaccgtggctctgtggtggctgtgactgctgagaggcgaggcttcatctctctcctggagattgattttgcctggggaacaatgctctaattcctgtgagtcactcgttagaggagttcaaagaaaccaggtggcgggagggtgtctgggatttcaggtttcagggtgattcgctcattctgctctgattactaatttattcttcaagcaagtcctttaactcagagttcttaaccttttctgcgccgtgggccccttggcaagcaagtgaagttcgtggactcctacaataatgctataaatgcatagaagaaaagacacaggactgtgaaagaaagtgatgatgcgatgtctaaaacgttcaaggcaccgcatctgtgatcaagaatacatgtgctgctttaccgacacatcaaagagcaaggtcagccgtgggggctaatgaatggctagcataagtgggacaccacggtgggcttgggcatagctgcgactcatgccagtggcagcctgagggagacaccaacttcagctccaaactagcaaagataaaaatgtatcttttcatcaggttagatagtcctgctttaactggaacttgtagattatttatttatttatttatttgagacagagtctcactctgtctccaagctggagtgcagtggcgcggtcttgcctcactgcaacctccacctcccaggtccaagcgattcccctgcctcagcttcccgagtagctgggactacaggtgcacgccaccatgcccagctaattttttgtattttaatagagacggcctttcatcatgttggtcaagacggtcttcatctcctgacctcatgatccgcctgcctcggcctcccaaagtgctgggattacaggcatgagccaccacacctggctgaacttgtagattatttggaagccagaagggaccttatgagcaccccgttcggtttttcatatacctgcttctgtatcagaaagacttgtgcaactaacagaaatgcagctcttcttgccaccccctgcctagacttggggaatcacaatctccaggggaaggcccagaaatgctcctgaagcatcttgctgtcaccagtgcccctgctgaggccccagagggcaggtgacctgggtgaacctcctaacggacagggggcttctccgggccctgggtcccgggtgcccgctcccacccccttagcagaattttggagagtgtggctgtgtttccttcgtggttgtttggacagcggcagagctgtgtgttttgaaggtaaagtgaggaattgactcttctccttccctgtggtaggtgctgtgactcccagtccctctttttctggagctctgtggagcccgtgggagccatccctggagagaccctccctgctgtccccaggcagcccctggaggcccagatgagactatccgctttggctgcagggcttgacgggcctgcctcagatgagctttggggagtgaaagtggctgcctgggaccctgggcgcctggtgtttacctagaaattgtgctaatcccgctaattcctgtgatttacacagcctcttggctctgtgtactatcttcttctccgggaagtggtgggaaggcgaggccacggatgcagtgggcactgcctggaatccccccgctgcatctgctccccacaggcgttcacgaaacctcaggtgcatctgtgtgcacatcctctccctgagccacagtctgggagctgggcatctgaataaatgcccctcctccctcactacattcaccctgtttctggagcgaccacgccctgaggtgtcaggaggcattttggctggaggatctgactgtaggcctggccccgtgccttcctggggagtggccttgggcagctcactccccatgggggcctcagcttcctcccctataagaactggtgatgacatctgctgtgctgaagtgaataggtggggttgccatgaggaagccgcagctgctgtgttttgggtccgttcttcacggatggagccttctagttaccagcttgagctgggcctggctgtgggaatgctgtgctgaagagctcctggcctgaaggtgatgaatgtaatacgggggtgttgagtaggacatgatctgactgcttcagggctgcaatcatgggctaggaggggaagtggggcttcctggaggaggtgacgtctgagtggcatcttgagagtaagagttcatcagacacagaaaggtgaagggtttccagtgagtggcatagcttgggcagaggcctggctgtgtgcaagggcagagccagttatccctgttaggagggtcaggcagccagggagctggtagggagaggaggctttaggtagacatgggaagactttacctgaaggccaaggggctcagcaggggagggatggagtgatatgtggtttctgggaagatgcctggctgaagcacagggaattacctggagtggaccagaggtgtgaaaagtgccaagacccagaggggaaagagtgcctggcacagagcagccagcgggagaggcagtgctggtgaggcgtgcgagtgctggggggtgtggggtgaagtgatggggctcacagtcttcgtgtgtgtggcgaggagaggaggaaggtgtcttaaggatgcagctcaggtggctggtgtggtggtgcctgtgaccaggtaaggggcagaggaacagcaggcacgaaccagtgtatagtgctagtaggccattcagatagccagactcttaaggggcggattttaaagtgggcttaaaagagcaggcagcaatccctgaatttctaggccaaaaggaggcccctgactcaccagcaagcagatttttctctcccccatctgcctgactttcttgggctttctgggcagggagttttgaaagactgtggaaactggccaggctggtgtgtgcagatgagccaggagctgacaggagctgtggacatccttcatgtggcccctccattgttcttgtgtactcatttttttctacttaaaaagatgtgggagtattgtgtggatttaaaaaataaaattctaggccgagtgtggtagtgtgcacctgtagtcccagctgaggtgagaggatcccttgagcccaggagtttgaggctgcagtgagctttgattgtgccactgcactccagcctgggtgacaggagagaccctgtctcttaaaaaagaaaaattcttggctgggctcgttggctcacgcctgcagtcctagcactttgggaggccaaggcaggtggatcacttgaggtcaggagttcaagaccagcctggccaacatagtgaaaccctgtctctactaaaaaatacaaaaattagccgagtgtgatggcgcatgcctgtaatcccagctactcaggaggctgaggcaggagaatcttttgaatctgggtggtggaggttgcagtgagctgaggtcacaccactgcactccagcctgggtgacagagtgagactctatctaaaataaaaaaatgaaaaaaaaaaaaacaacataaaacagaaaagttatagggcctactaatgtggatttagctgagggccccgggagtggagctgaccactggtgtctgcacactgcgacccccgtccccacactctctgcaggaccttcacacagctgcccataacctttctgccccactcctccaggtgtccagccaaaaatgccagctatcttccccaccaccttctttaaaacatgtgaccggccaggtgcggtggctcacgcctgtaatcccagcactttaggaggccaaggcgggcagatcacctgaggtcaggagtttgagaccagcctgaccaacatggagaaaccctgtctctactaaaaatacaaaattagccgggcgtggtggctcatgcctgtaatcccagctactcaggattgcaggagaatcacttgaacctgggaggcagaggttgcggtgagccaagatcgcgccattgcactccagcctgggcaacaagagtgagactccagctcaaaaacaaacaaacaaacaaacaaacaaaaacaaaaaacaaacatgtgaccatcagatttatcttctgatagaaaggctggattgccagtgtctgctctgacccaccactcagctggagacggaagttgcccatgccccgaatcccgctgggtgttcctcccttgctcacagccactttccatccctccttatctagtctgtagcctggtctgttggctctgccttcaaaccatgtccatgtttcaccagctccaccgccacctgcttaacccaaaccaccattgtctctccctgggtcactgcagtagcctcctctccccgaaaagcctgctctccgcacacagcaatggagtgacccttttacacccggagtcagtcctgcccctcccctgctcaagaccctctgatgcctgcacttcccttctggccactactcaaagaagccagcctcctcccacaaggcccctggctcctggctttgccctctgactgcagtggggtggcccctcaggcatcccatccctaccccagagaggcctggcagcgctgccccgctgtgcccctgcaaccctctctgtcctgctttcttttcctgagccacctcccactcactgagattaaatctacatttattttccccttgtttgcccccaaggagaatgtaaactccacatattgtatcttccgcaccaggcatgatgcctgatgcatactaggggcttaaaaatatgttgactgagtgcgtgtgagtcaataaaggatgaacatttattgaatgaatgggtgaaggagtgagcgaacatgcagatgaataagtgaaaggttctggtgagcagggaagccacctgaaaatgagggcctttctttgaggacctctaggtcattgtcactatatttgtttttattttccccatgattcacagacagaggtcattgtttctgactttatttccctcatcagaggctacccgccactcatatcagtaggaacctgttacttagattttgtaaaatctgggtaaaagatgatgagaatggcctgcagttgtccgtgaggtcgttcagaagaccagacgaatcccaggactaataattctcaaaattaattaaaccctccttcccaattataagagaattagaatgaagttggttgctttaggagcgagcggcggtgtgaatctgggtcggcgtttcccggctgggtttgggctcagtgttggtgagtgtctttgtcttctcttttaggattgccacccaggacgatgagcggctgagatggagacgtctgcctcagccactgcctccgagaagcaagaagccaaaagtgggatcctggaggccgctggcttccccgacccgggtaaaaaggcctctcctttggtggtggctgcagcggcagcagcagcggtagctgcccaaggaggtactttctgtttcgcacacttggagggcagcaggggtgtttttcattagcccgttaggatttaattagagtggtggcccatgtcgtcagggaggcatgctgggtttatggagggcgaagaggaaggcacctctgctcccaggaatcccaggcaccatgaaggtcacctgtgagtttgctaagaggtctggccaccccaagtccagggggctgagctgcctcagacagcggtgggtggggcctgagtactgggaggggagagagggaggaggggagagagggaggaggggcatggtcgctgccaggcagccctggggtgcgtgcagctggcacatttgaaatgtgcccagagaacttcttgcctcttgcccgccaaggactgttttggaaagtaattgtctcctgatgccttctggctctaattagagggtcaggttcgggatttactatcttaggtgaatttttggccaacttaattataacaaaagagactacacgagccacagcctctcattttactgccccaaagagaaagactctctggtttctactgggccatccgtgccagcatcccgttgggaaagtttggcgggaaggcgagacctccgctgtgtctgcacagtccatctggaggccacagaactatttctgtctcggaggaatggagagacttcgatttcttttcctccctttttgttccagtgcatttagtcaggccctgttgctctcagggctgaggcacagctcagagagcaggcagggaagagaatgcgccttttcttccggcgggcgcttgggcagcgcccctcacactttgatgtatacacagttgttgggggcttgttttggtggagaccccgattcaattaagttggggcagggctggctgagtttctgcatttccgttgggtgccaagatgatgctggggctgctggttcacaggccacgctggggccggagcccaggaacatggaaagaccctcggaggggcttaggagttggtgcttctacgagtggacctgagggcctgcggggggttgttactgtatttacttttatttttcctgcggttctaagtgggaggtcattattgggatgtgtggctcatgtcaggaaagggagatctgaggtcaaccttcaggccccttggggaggtggccttctgagctggacgatgcctctccaccctgtgccccttggacggggactctctaggccctccctctgtgaggaggggccagctgggggtggaggaagagctcttaggtggagtgggaggagccaagcgcacagggagggaagagctggtggagcggccctggtcctggggccacacatggtcttttccttcccctgggtcagggccatccttggcctgtgggggcacctaaagctgcccctctgcccatgctctgaggccttgtgagctccaggaagcctggcctctgtgtatgtctggcctgccccagggttttcagcgggaaccatccccccatccctccgccccacaccctgcctctccaagccatgagtggatcatgaaccaccatggtgcaatttcctgatgtgtcacattagtagaggacagacttaggcagtaattagacagtaattagaatgtaattgccggggagcccctctagtgtcaggctgagttctcattattggtgcaatagcaacagatgcttgagggattctcaatctgtggcgggagtaggggccaggcaggaggcccaaagtttggagtacagcacctccacaaaggccctcacctcccaaccccaccccactgcagcacaccctttcctgcccaccccgcaggcccttgttgtctgatcgcagggtggcttggctggtgaggttccagcggagggtggacccagccttcgtgagcatagttgccacagggcaggtggcctgttagcttcagagcagtcttgggccatgtgtctgctgctggagagttgtgaggaccccagagcctcctcacccatcgctgctccctgcacctgtctctgagcagctttttttgggaagggtcctcctggagtcaggggagagcagctgtccctgcgtggcgcaaagcagggacatcgtgggccaagtctcctagtgctggtaaaatgcgacggctgcattcgtggatgggatgggaggtgcgctggcctgggtcccagttttcctaatctgtgtcgagagtggatttgacaggtgttgtccacagtctttatgatcttggaacttcgggtcttccttaaatgttactggatggtggcagaggtgcatgagcaagaatcctcatgtattcagcaaccctgagtcccccagaaggctccaaagagccatggatgtgggcctcactgcctgcgggagtacagacctgtcagcaggtgaggggaatgtgcggaaggaggtgcctggaagctgcaggtggttggcgtgggtccccctcaggggcggggatgctcttgtgttcatctctaggtctcagcatctggtgctgggcctggcatgaggggtacccaagggtcttctgggactggaatggtgtaggagaaagggtggcattggtgaaggaggaagtcttcatgggccagaagcgtttgctgcagccactgaggagttgggcactcagccatcaggcacagggctgggtgtggacagtgggtgaggaggggccgtgagggactgtaccaagcctgggagagggacagtgccgcagggtgcaccccgggtggatgcaagggtgtggggagctgagaatttttgttgaggggcccctcttctcgagttgtttctggcaaagacgaatcatcttggtctgggcgactgctctgaggcctgtttgctgggggcaggagcagactgagtcgactcccctgttgctgcgcaggtgaccacttagaagcctggctcctctgaggcctggcttgttcctccaaatcccgtgacattgtcccccatggttcacaccctgatttgctgtctggcggaaagggatgatttattattattattattattttattttttatttttatttatttatttttttgagacagtcttcactttgtcacacaggctggagtgcagtggcacgatctcagctcactgccagctccgcctcccaggttcacgccattctcctgcctcagcctcccagtagctgggactacaggcacccgccaccacacctggctaatttttttgtattttttagtagagatggggtttcactgtgttagccaggatggtctcaatctcctgacctcatgatccgcccgcctcagcctcccaaagtgccgggattacaggtgtgagccaccgcacccggccgaaagggatgacttatacgagcttagtgtttcctgacttattacacatcagagaaggtgtggggtgggtgggtcttatctgaggatgtcaggggcgcagtggtgaggaaacagccaaatcctgcaagctgtcaggggctgtttcctggcatctgtaaggtatccagatgtgggggcaccctgcattccccggcagctcatggcccctcatgcagcctcccccacccctcactgtcaccagttccgagagcttccattccacggctagaattgcatggcttgagttggttgaaacagtacacatacctgcaggcagaaggatttcacttttttgtttgtttgcttgttttttgagacagagtctcactctgtcgcccaggctagagtgcagtggcatgatctcagctcactgcaacctctgcctcctgggttcaagccattctcctgcttcagccttctgagtagctgggattacaggtgcccaccaccatgcccggctaatttttgtatttttagtagagatggggtttcaccatgttagccaggctggtctcgaattcctgacctcaagtgatccgcctgccctggcctcccaaagtgctgggattacaggcgtgagccaccttgggatttcacttctgagttctttatatctgtgaaaaattgaaaacagcctacctgttcattgataggggattggttcatctgtggaacatcttgaatggaacacgatgtagccactgaaaatgttaattaagacttttcaattacagggtgggaacatgcttgtattctaatattaagtgggataaaaagaaggtgcaattgatctcaagcacccctagcaatgagatagaaagtgaaggttcagagtgaggagagaggacatgaagggggtgggaggccccagccggaaagctcggaaaacccaggcaggagctcctggatgccaggctggtgtggtcagagcctctccttcagtacctcccgtattgtagatgagactgaggcccatttgggcatggggcttgcccaaggctaccagctgcttcaaccacgagctgggcccggggcttggggctcctgcctctcacatggtgagagtctctttcaggtatttgcttttagattgttatttagattgctgttagacttgggccttaatttaggtcctactgctaccccagggtgagtgtccagccttggtaaggtctcctcatgtgtcttcatgcctcagttccctcatccatcccaggccctgatggcacctgctctcttccaaacagccagttatttgaggtctggggccgtgagttatttgcaaagtcacctacctcgactggcctctgttgcctgacttcccctaggagtccatgaggtcggacctgttgggggctgggtgtttccacttagagtcactatttccctgtgccagaatatgcgtgagaaatatatttgcagagcagagcatggctgggctggaccgagctggaccaaaggaaaaagcagccctgtggtcagactggggaaaggttagtttaatcatctggctggagcagttcataagagcagacggcagaagcctgggagggcgagttctttcccagtctcttttgctgttgtgctaacactttggaggccataaatcttttaaaacacattttggcccagaggttttcccctcctttaacttctaaaatggtgtaattttaaaagcaatttgattcagatgtttctcattgctttatactgaaactgtccaaatgctgttgtattttcctcctccactgtgggttctctttcaaaaatatttctgaacctctctgtgtgcctcactgagcaccagggactactattcagagcctctgggataatatgaaaggtggagccatgaaacccagagctgggtctgatctcatgagttttgctagtttctggaatcaagcagccagacaggctttagacatcctgggatgtacctgcaatggccaacgcccacctcttccacgaagcatccactgtgtgctgggccaggtgtcctcccagtgtgggccgcaccagcaacatcagcatcccctgggaattgttagaaatgctaattcttgagccccaccttagacctactgaatctgagtctgtgggggtagagcccagcaagctgtgtttacacaaaccctcttggtgattctgatacactcctaagttggagaaccgcatgttctgactacatgaggtagggtgggtcttcccatacataaaatgggagttagacacagagctgcagtgcagagattacaggagacttctgatgtgcttacacaggcctgccagggcacttcctggatagtagctgtaacactgcctctcttagtgcaggcagtgctaaggaagtagtgagaagcagcccaggctctggaaccaggctgcctggttaagtcccagttctgttgaccttaggcaggtccgtgcctcacttttctcatctataaaatgggcatgatcttggttgtgagcattccttgagttagcacatgggaagtgcttcgaaaagtgttgggcacagagggccttgtgtgaggtccaagttgagtatttgctttatgaactattgctattcttcctaccagttttccttttctagatctgcatactctgcctgacttagaaagtttccctttcactggtaacccttgcctgctgacccgttgaggctgacagcaggtgggaaacccaggtttctggtgacttcctacttgagagtggtgggtgccctgggctggaaatcagacctgggtgcctgtcccactttgctttgctcccagggcctgtcctgggtgtctgtcccgagtgggctcctggcctctctgacttggtcttttccccagcacgctggagaccagaccagaccaaaggttactaaagctggccaagccttagactctcgtgacaatcactatgtaagtgcagggtccagggcagcccctgggctggggcctgggcatatgtatttttaatacgcttcacaggtcattgggcgcagtccgtccaaggcatgaacaagatcccttggagtattcaagagtctcagggggggagactacggtttgcagctggtagtactggcggggctgtgaccaggctagcatagctagggtcaagcactagacgactttcagcagagcgctccagtgttccaggaggcgtgtgtgctacctactcatactgacagccctcctatcttcttcattggccctgctgggttcttggaaagtttttctgaggcacagttttgcttagtggcgaggcatgcatgtctatatgggaatgctgtgcaaatagcagaatatttagacgactcattttcattgtgttggccagagctagaaaatcccctcccaccacctgccttaccacacctaggaatctgtccaatacccctccattggtacgtacctccaagtccctggtgtctttgcactctgtctttttctgtgcctccaggatgtccttgtgggcagggcattgcttgttcaccactgtccccacatcaccgcttgcagcagacatcccataggggattatggaatctgatgctatcatgccagaggtgttcccggtgggctggtgtggtcagctgtctctgggtataagggtcagttgaggctggccgtggtctttggcccccctgccaggccccatggccagcagggagctgagtgggccaccttccctggcttatccgagtttctctgctggggccacacacttttgccttggacctggagatgcacccaggtgtgactaagtgggcaattactcttatttaagtgattttcaggaaggctgttgatgctgctgggcttgttttatggcccagccatccagaacaaccagttcccctcagactttgtccagagagcagagctgagttcccctgacagcctggttcacccaggaagcggggtgcaggctgaccacccagatgtttttcagatggttcaggagtgtactgcaaggttggacgcctggggcgggagcatgaggttggagacttcttcctgctcccagcagagtctagtgggaagagcatggcttggggtcaggcagatctgggctcttcttaccctctgcttaccagccgtgtcttctgggcaaatcaaggaacttctctgagattcgtgcagtggcgatggtagtggtcactacttctggctaccatggaactaagcgagacaaggtctgcagggtggctagcagagcatgtgggcacggaggaagtaaatgtccacataacggaaacccgagcattcctctggcctgtcctggcctcacactcactgccactcagaacggctgccgtccagaatcagcctggccgccccatttccccaagcacaacaggtttgttctctgcttctggccgcagcccggggtctggactctgggaggctctcctggcccctgcctgtcgctccccttggttgcagagaccggcacacatgtttcacgtcacctctgtgtcaccttgttttctggctggttcctataagctggtgaaccctacctgcctggaatgacagtgtcagaggacagtgccggtggctcctgcccctgtgtgctccctggggccttggccatgcctggccggcactccttcatttctcacggttcactgtgaatgttcagctgatgcagagttgggtgaagcttcaaagtcatttccacttacagaactggaagaagcttttgaaatcctctagtttgaatccattcattttacagatgtggaaactgaggtccagagacacaaaatgcagagggttgcctagtgatattacttggactggaaaccaattccgcaggaacattccatcacatgggacacagctgtccctcaacctggccctcctcctggcccaaaccccaacttcccaagtgactgtgtttatgttggaaacatttttctgacgtttggttctgtcaaaactaattttagcatttctaaagcttggtaaaaatacagcctcattactttgatgtcagtgcatagtttactattagtatattctggggtttatcattttagtcatgtttaacacggctgtgccaggcatgcactattaaatctggcttattttacattcctgtccggaattatttatttgtaacaatttcctctctatcaaaagacacagctaatgctgtgttttaatgtgttatttacacacaaaataacctatttacaactcagtatgcgccggagggagaatggatgggcccctgttccctgcattctgttatatcagagtttaacaatctggattgctaatagaaccatttatcattacttgggagggggggaaagagataatttattttatgtttgtggccaggtctcaccgcctctgatcttgggaccattttgaggataatgaagtgaagccctgcatttggtgggggctgtggggcacccgggcctgggtgcctctgggttccctgcattcatgtgcacatcctacagatggtcccgaactgtggaccagagaggtggtgatgacagggacgttgcctctgccttctaggagcttccagttagaggtgacactcagcagatggtgacgaatcctgcccatagggcttcacgggggaggcagtgtctgagcctggggacattcggggttccaccaggtggaaagaggaaagggtgggtgggccctggtgggaggaggaggggcagagtggccccctgggagtgtggggagggaggactgggcgccatcagctcagtctgtatgtctcctgcgtgagtccatatgtctcctgcctggcatatggggtctgaaggacaaggctcctgttgccctgcggggaggcgcagagatggctggcacccaggtgggtgcatagctgatccagggtgcaggccgaggtcccggaggctccactgaagtctctttgaatggacattgaggggtaaggagggaaagcgccatttgaagctgctgtcctctatgaagctctgtgtggacaccagagggggataggaagtgggggaagatgcatttaagaagcaggggccatggccctgtccccaaaagcttgtggttcccccatggagaaaccagacaccccagttacgatgctgatgtgggcattgtctgctgcctgcagtgatccaggaaaacattagggaaggagtgtggtctcagtaggacctggtaacactgctgtgtacagccctgtgacctggctgctcagtcagtcccacagaaagccactgtgcactcagatcagggggctggggagggggtcaccaaagtgtgattgcaaagtgtggcagggcttgggcaagccccctggggacgatgcagggagccatcagccccaggacaccagcatggtctgggggatggggcctgggcttggacaggtgaggtttgaacccttgccctgccccttctcggttgggtatcctgtgctgatccgaaccccagtgtcctcattttaaacgcaggccaaaatgcgtatctttggagggctaggctgaccaataatgagactccagtgcttagagggtccctggcacacagttggcattctgtacatggtagttcagctgttagtattatggttcttgctcttattatgattcttaattcaagaactgttttctgagggtagcgcatacgttccttaaaaatatttgagagagcaaatgaaggagctgagtctctataatgagttagcagttcacccgtgatgtgcaaggaggaaccacactctagcctgagaaacagcatgggcaaaggtcctggggtctgagaatggctggagaggctgagctgagcgggaagcactggcaaatgaggctggttttgtcagccccttggcaaagggctcccttccctccccgatcctggcacaagctcacatctgaggccgagtctagtggcccctcctagggtctgtgtcctccctctgctcacagccacacgtggacgctggtaactcagccaggccctgtgtgcacggcttgcttggaccacccccccacacacctccccgcccccgccaccctgagcatctggcttcttctccttctgggtgggcagggtggggagggagccagaggggctctgtcttgagaagccgcccttggctctttccccttgaatatgtcctggctggccctgctgtcagagggcgtggacctctgctttgtgttttgggggattgtgaagcttgaaaccctggcaccagacagccaggcctctgggcagagcagggcctcatccgccgtctgactttccatctcgttttcagcagtgatatttgagaggaagtttgggtttggtatggagccgggcagtggacaccgctttgcaccttctattatccctgcaattctagaaatggaaggacgtccaggagaagccccttgcagggccaagcatgtggtctctgtgtggtgtgatggtggccagggtggggaagtccctgcccccgccgagtgctgcaatcccaccattaggtgtttacccccttgctgtcaccttacctctgggtttgtgcaaaggcccctgttgtccatcatcctcctgtgacctctccccagtggctcctggatcagctggagagggccaggcttctgagcactggagtacctgtgcctggggaagctcacccaggagagaagagggtcagggagggaagaaaaacttgccaacgacacactttgctgactgggtgagttgctgaggctcgatgtcagcgagatctttgtcctgttgccagtccccagactgtgaggtttccacgctggagtcaatggccctctacgccatgttggtgacaagaaaagcaacaggcaccttcacttagaggacagacaagtgtgagttcacatctaggtgtaggagcaggggccacccttgccttgtctgtctgtgaaatgggggtgacaaggctcccctcagccaactctgtagtgcagggtggcctggcatgtgggcagcgggctgctgttgttattctcatgggatagtggcaacccttgcctgaaagcacctgaggccgtttgtgtcttcagtggctcgggcactgtggagcttcccagctgcccatagttctcagcagcgcccacatgcctggccccctgggttttctagctccaggtcatcagggagggaggacccaccagttccactcttcaagaactacctccgataattgaaaacctatgtgcacacaaaactttgtatatgggtgtttatagcaatgttagttacgatagtcccaaaatggaaatgacccaagcatccatccgctaatgaatggatgagcagaacgtggtatgtatgtacaatggaatattactgagtcataaaaaggagtgaagtgctaatcaatggtatacacaaatgaacctcgcaaacatatgctaagagaaagaagccgggcataaaagcacaaatattgtaggattccattcccatgaattgtctagaatgacaaatccatagagacagaagggagatgaggaggtgccaggggctgggagaagagggaatggggaatgattgctatgggcttggggtttctttttggagggatgaaaatgttctgtaattagatagtggtgatggttgcaacagctctgtgaatgtactaaaaaccactgaattgtggactttacaagggtgcattttatggtatgtgaattacatctctgttttaaaaagaagggagggaggagaaagaaaggatagaaggaaggaaaagaggaaggaagtgcgggggagggagggcgcctgtggcggcatgggggcctggtcgtgctgctgctcacagcccctgggatctccaagtgccttgtgcaccgctacccctcagggaggaccctgcttcccctggccaatgagcagccttcccatctaatctataggccccagaagctctaaaaataactgaagtggaagggggatgtttaatgacaaagtaaataattacattaagggtgcgagtttggaggggagctgagtaaatcaccgagaaagagcaccagcctccagctaacttccactcctttatcaccagattacatcctccttggaacctgaatcattgactgtggctggtggcaggctctgcagtggtgggggctgcggtcaggcaggtgctgagagagatgccctgtgagcatttcagggtgaccctgctggccccaactccaggtggatgagccccaggggcgggggccctgtgctgctggaaattaactactctgctggggggagccaggtctcagggatggcctcacagccttgctgcccacagctggagggggccaggcttctgagccagagtggcttcaggggccatttggtccattgaggtccaaggagggggatggtcttgccagtgctacgcggtgagtatctaccagatcttggtagggagatttctgggagtggtgttcccagtccaggtgtgctgggccgtcttctgtgttgagagcaacatctgcagtgggcaagccccagacagactgtagccctcggaagtggcagcgttcaccagctttggcatggtgtgggctggggctgtctggcacacctgcccacctcccctgtcctggcctggagccctcatttagtcccttccattgctgtccctcctccctctacctcatggcctcatcctgtcctcagggaggcccagccaacagcctctctcctctccctggccctgtgctacccctcaggatatagaggatgggcaggctcccaggcttatgggatgtgctaataggggcgcttggaagggatgaggatacagggagacagcagtgccttggcctgaagggacagatcttctcgatagaaactgagttaggacacttggtgcaagcaacagaagcccgctctggctctctgaagctacgtggcgttctggtcctccgtaactcagaagttcagggttagatttgcttttaggactagctaagcttgaggctccagtgacgtcactgggacatgtctctttctgtccgtgatctcgattggctttccgctggcctggcattctgatagctctgatcaccagagggtggagttgctgatgtgtgcctgatacccatgagctcagatggaggagtgtctcattccgggtgattccaggaaaagccctgggggcaacttattggctaggcctgggtcccatgcacccttgtgaaccatccactgtgaccgagccatgtagtattttgtggggtcccatgcatacctgtgcaaagtggggtgggtcagcccccttatctgctggagctgtgcatagaagggtggcccatgtgctgctggtcaagccaaataccagtgtccgcctccctgaagccagatggcaggaggagtgtgcaggagacccggagaggcctgggctcctgtagacatccactggtggatggtggggtcagagttgggcccttcagaagcagcaaggagtcctctggtcattctgtccccccagcctcattctttgggttgtgccaggggtgctgtccccctcccctacttgtccttttgagctccccataagggtacacaaagtgctccctgagaagtgccagaccagagccttggagaggaaatgctagaaagttccaggggtggcatcgctaaggagggctccttaaagaatgagagagctactgggaaggtggaggtgagcagaggctcaacggggggtggatgacagggcatatgccagggcagggagcagcgcctgctggagaggaggcttcatactaggggtaggaggagaggtgcagttggaaagggaggttggaatcactgtggggagcctgggatgccctgagaggaatttggatggaggggtagtagggagccattgaagggctttgagcaggggaggggcatttagaatcagcacatctctttgctgattgatttgaagcattccatacccacaaatgaaatcctgctggacagctctgcttttcagaagattctttttcctccctccctccctccttccctccctctttccttctcttccttttttccacaagtgtttactggggccctactatgcgccgggcagtgtagtccctgggtggcagcagcgaacacacaggcaaggtccacttctctggaactgacattctagttgggagacacaggcaagtacccaaatcaatgactgtgcggaacaggatgtaagatgggtattctggcagggagagatgggggatcggcggcctcagccttccttgagacaggaacacttttcccagggttgttgaagccactgtctctctcaaatgtgctggttagggcgcaatagaaaaccacttcctctgctgtgggaggagaagaaactcatcccgaagccagctgcaggctgaagagcgggttcaggtcacccctgtacagcaggacagggccacacacacatgtcgcggcccggtcccctcactgcgttgggagtccggtgtccccaggagccgctggatgggcccttgtgcaggcagatgccctgggtcctggccccacttgtgggagctgtggcggttcccgtgcatccttgtctttcacgggggaatgatgaggacttccctcctagggccgtggtcagggctgaagctgagacgcaggccggattacgatccacagggtcatcctcacaggggttttggaaggactgaccgtgctgccaccatgggggacctgaggcccttctttccatcactggggtcatgactcccagagtggccttctgggggcatgtctggcctctccctaccctcacaccctggggtgtcatggtggaacccatggtctctgtctggggacatcacctttcctagtcattcaggctgccggggagcccctttctcctgttgccgtccttggcatgcgggctctgacctctcttttcctggaactttttctcctgggctgtgtttttcaggtctctgaacctctggtgctggcccaggtgagtgccccctccaatcctgccagtgtgtgagctctgttctccctcttccacatgggggatgcttcacagcagtgagggcgagagtcttctcttctttctgtgtgtccccactgaagaaggcggggacacctggccatgttgtggagcctttcctgggtagggaaagagcgctggtctgggttgggagatggacccccagcactgcgaggtccccagacgatggctgtgaaagggtcccgaagaattttcagcatgccacacacaggatgtaaagtgttggcgctcctggccagcgcctgagcaccactaatatggacaatgtcctggcagggccggggtggcgaaacatgcttcttttgtgcatctgttcccaaggaggaattggaggcttctgaagacttaaaaaccacaccaaaacaaaataaccagagaaaatgtttccctgtgctgtggttctaagagctgcattgctttggggaagaagggaaggcaagaaccccctttgaaatcttttcccggaggaggtgggggatggcgtgggtgcccatggacatgcagtccacgtgatggctgccacgtgcccttgagcatcctcatcccagaatggcccagctgcgcacagaggaacagcctgatcccctcagctgcgttgagtcttgggagagggagagccaagctccaggtgtcgattgaaactctgagtcctgctcgtgcaaggactttgcagctgcgtgactgcccggggcgatgggtgctaccacacttgtctgccaggccattctcctgacaatgttcttgtacatgcagctgcagctggccccagatccccaggtcccccaccaccaccctggcccctcactgctgacttctcctccatctcttgccattcttgcatgcagtcttgtccccaagacaagtagggaagatggtgccagcctagtgggctactttgtcctgagaaggtcatgttcagcttccccaccatccaagggaagtctgtgcccctgatttgaggggaagatgcattttctaaggttacttcaacttatggtgtcttagttatcattcttagaagcaggctcttaagagaaggattctggtatacctggtttatttggagttgtagggaagggagtggtgaggtgagacgggaggaaagcacccataaagggaggctaagagagtcagctgcccccgagaacaactggagcttcatccctggggggactctgggagctggcatggttatcccatcccagagaaaggaagcagctctaaacaccaattgctggcagtgccccactgagggttcctttcgcactccagacctgttgcacagctgggcaaagtgggctttggagacagaaaaccctcagttaaccacggtgctggtggttggaaaggatgtgtgcaccaaaggggtaagggcaccgggatttgagtgggaatcaacaggatctgccctacagagatgggggtggtaagtgctgatcgccatgatttctgggggcttaggaagccttttctgtgtctgtatgattttgtggttaaacatgaatgctgatggctgaaaggtgtgtgagtgtggtaaaatggatacttctaggcagatcacctggctgttgtcagatatcagtgcctcactgggaatgagttgatcagatttcatgctgagagcagtgttgggtggggtggagcaggggtcccatcctccggctacagactggcaccagtccatgccctgttgtgaaccaggccgcatagcgggaggtgagcagcaggcaagagcattaccacctgagccgcaccttctgtcagatcagcagcggcattacattctcacaggagcaagaaccctattgtgaactgtgcatttgagggatctaggttgcgtgctccttatgagaatctaatgcctgatgcacctgaggtggaacagttttgggattcctgcccccgcccgccccaccccccgcccccgctgcattggtccctggaaaaattgtcttccatgaaactggtccctggtgccaaaaagcttcgggaccattggggtagagggcaggacagaggctgcctcttggaggatgaggtcagaaatgggcgtgatggtcctggagatcccctgagtgtatcctcaaagacaagggccagtgtcctgtcctgtcctgtcctgttgatgccagcgtccacgggcctgagacagggagaggtcgatggttctcccagctaagccttttagaatggaggagaccccagaccctgagccccagggatgagcctgatctataaccagtcattgaaaatacatacagtgaaatggaagtttctgccattgagcaggctcttgctgaccgctgtaaagataagtaacggcagttttcaggccacttaaacccttacctttggggtattaaggggtctctgcagacagtaagtctttatcgggaagtgtttactcataaaaaaacacagtgaagccggggagagaaagcacctcagcctttatggcgccacaacccatctgtaacaggagctgcaaatcacctgtgggctgcagacgattctgcccaaaagttgggggcggaagtgagagtaaaagctgacttgctaccatgcagacagcattgcctgccccgccagccccctccctccaccgatagagggactgtgctgccgtgtgtgtggctcagccgtcttgctgtggctcccaagtaccacgggattgagcctgagctctgtggtcacgtgccccctggcccacctctctagcctctgtgcctgcgcacctctgatggtgctccctgcttccagagtgccttcccctgcttttctacccctgggagggctacccaaatgccctccccataccagttagagtccgatcagtggagtagaatcaccgtgagagacttggaaccagggtggtgataggatcagctcctgcccagtcgtgggagcagtgatatctctacaaagccacggtctctgcctctggtgctgggctgaagtcattgtaggtcagtggcattggcgatctgagggggtgttaggtgtgacgtgggggagaacaaggacaagctggaacccaccaggatggttagagttcacgcctgccttcctgtacttccagcttcatgatggataggtggatgcacatggggttggaggtgggttgtatgaccctcccccttggaactatatccactcctggctctatgggagaaagagctggctccaaccctctttgccccacagatcagtgatgatgtttggggactgagggagcctctgggatcctacagtagcagttccaaaccttttggtccacagatccctgtacacttaaaaattactgaggaccccaaagagcttttttttttttttttgagactgagtctcgctgtgtcgcccagactggagtgcagtgcagtggtgcgatctcagttcactgcaacctccgcctcccgggttcaggtgattctcctgcctcagcctcctgagtagctgggattacaggtgcgtgccatcatgcccggctaatttttgtatttttgtagagacggggttttgccatgttggccaggctggtctcaaactcctgacctcaagtgatcggcccatctaggcctcccaaagtgctgggattacaggcataagccacggcgcccggccccaaagagcttttttaatgtgggttatatctattgatatttaccttgtttgaaacttaaaaaaatgagaactatttaaaatattttgtcttcaaattcatttgaaaataacaatgatacaactattatatttatgaaaagagcttctccaaaattaaaaaaaaaagtaagaagagtaggattacacttctgcaaatatccttaatttctgtcttaatggaagacagctaaattctcatgtctacttctgcattgagtctgttgcactatgttgttttggttaaaatatatgaaggaaatccagtctaatacagatctagagatagaaaagaggagggtattttaaaagccttttcgcctaatttggatgttctttgatgctgcaccaaaacacgacattatggaatctgaaacagatcaaaggccttcccatgctgttggttaaaatccatgggtctgtcttgcactttgaatggatatttttttacccatgcgttattttgtatgaccgtgcatcagtcattcagaattagaagcccacatcttccaaattagaagtccagatcttccaaagctacactggaaaatacagagacaatgagcgaggaagacaaatgaggttttaggattattatgaaaatgtgactttgcccatctcttgagaggaccgctgctctatgccatccttcctcctaatcccacatagatttctgctgtggccagccctcacccggaaccacacagggaagtgcgtaatgtcagcttggcgaagtggcctcggtatgaagccacccccactgcctccgtggggtctctcccccagctcccagccccgcagtctggctgcgcttgtgccctgaaggagcaggccatgctcactgcccacctgtcaccccttccatcacatgcccatcatgacaggccccctcacttcaccccattggccccgctgatgagctcgctgtggaccatcgggggatctcctgcctcctcctcttacagtctcatcaccgctccgcctcagccctttccttccctggcttctaagctccccttgtgttctcctgcctgccccttttccctcaggtgaaggtcccaggctttgtcctgagtgctcttctcttgtcactggaaactcatcgcgggggcacctgggtagcaagaccctctcagctgtctctgcccagacccctatatctgtctcatcagctccaactgctcatccactggcctgcctggtgctggatgtcccaggctgtgtacacagtgcccctccccacccatcccacatcacctggccccgctccagactcctttgcgggcgtagcgtcctcacccactcgctcgtatggagcaaacctaagagacccggccggcctgagaaccatgtggcagggctgaggggatggatccgcacgggaccttctgaggacagcttcctgaggcctccatgtcctgccattacacatgaggcccagaagggtcccctggtttgcccagggcctcacatgggatttgatgggatcctgtttctaaaccccgtgctccactcttgcctgtgcttttccagggcccttggttcaagggccctgtggccctgtgcctgcatctggttgaggttcacagctgcctgaacactggggccttgcagagaggtggtgggaggagctggagagctccaaggagccccgctttcatccccgaggggtggcagtgcctcttccaagcctgcagggcaggggtgtggagggtgaagtctaacaccaggacagccagtgggtacatttagggctcttgtttgccatccaagaagaagcctccaagaagaaagtagcatctgcttctctaatcagcccctgggaaggagtgtggacgtgccagtggcctgagacagagataaatggtgtgcaccgaccctttgaactggctgggcctagtctgggtgcatttagtgcagacaaagccaagagccaggaaggactgaaccacacaaggccgaggtgggccaggcactggcattggctaagtccttaccgagtaggtgctgggcactacaggaaggaagcaagagtgcgtctctccctgcccctcctccccaaaccccactcccaacacgaatcactcctgagtcttgataatattccgagtgagtctgggccccaggcgtgtctctccagggactctccagtcccccagtgtctccgcccaggccctgtgccctgccaaatcccaaggctccttcaaggccaaattcagtagtcaattctgtttcattcaaaaggcatttagatgtttacgaaaggcctactggttagcatgttaccagggccacccggctagtaagtggtttgagccaggatttgaacttgaatccttctgagcctcccccaccttatgctgataacctgcttatctgaagcagccgcagccccccgccctcttttactgatacccacttctaggttacgtgctgggaaacatatcattttgttagaatagtttctaagccaagaatccagacgcactgaataagggcctagggggcttttatcatacactcttagtgcaaagcctctgagatgtaggtttaggggctcaggggcttcttggctcttgttgggttcctggctgcagctggtagagttgccttttaggagtgagtgacctccagatgggtgaggtttgtgttgcactttaaaagtactgatagtagatattcagagtgacagagtgccactaatagagatttttttttttttttttttttgagatggagtcactctgttgtccaagctggagtgcaatggtgtgatcttggctcactgcaacctccgcctcccaggttcaggcaattttcctgcctcagcctcccaagtagctgagattacaggcgtctgccaccatgcctggctatttttaatatttttagtagagacggggttttgccatgttgaccaggctggtctcgaactcctgacctcaggtgatctgcccgcctcagcctcctaaagtgctgggattgcaggcgtgagtcactgcaccccaccggtttttgtattttctatccaccctcgtttttaatcttcctttgccattcctcctttagcagctgaaagccaatggcaggcacagagaattctataacctgagccttgttctcaagaaccagaaatctgaaggactttgccacaggcagtttattcatctgcttgcaggcatttaccagttactgtgccagtccgttatgctggggcaaataccccactggccaagcccccagggagctcaccggctaagaagaaggactgatcagtgcaaggacagcatcttagtgtggtaacgactccaagagaagtcatttccagatacttcatcctgctgctgggggaagagaggcagggaagacttcttggaggaggccagacccagcctgagctgggtcttgagggatgaatacgggttcactaggcagaaaagtggggcccagagaacagaatacgagcacaggcagcaggatggccagccgccaaggccatgggaacctggggaaggttggctgctttgctggaggaaacctccagcagcatctactgaggcatccacccttagaaagactgaggctgatgaaggcaagtgaaggaaaggtccaggctggtcccttttgccctctgtctggttttctctgagctaagatagttctctctggctcccttaaaatcaggacagtggagcgaaggtgggtttgggggccaatttctcctcctctcagccatcccaggctttgctttcttgccgagtctaaactctcagctgtcgccctcgtatttgctcaggggcccctgttagggggactgtgcactttcatccagctggacgccggagttccctggaagccgagagggttaaatcaccaagccagctggtgagcattagttcccccctctccaggcagtaacgtcagaggctgatgctggcggcaaagaagctggtggcaggaggaggcggagagctgccttgaggcactccgggggtgggctcctggcctgggaccctgccccagcaacccccaggtaggctggctgtggatgtgtgggctccggacaccctgcggggacggctgctgtccacgccagtgtgtggacgtgtgtgcacaccctgtgtgtctgtgtttcttctctttgtgagagttagccttctgctgtggcaaaaacttcagtggagaaggaaagagtgagcgctggagagggtagctttttttctagtgggaaggggactgacttctttaaacaaacactcaagtgttccagtggccacggagcaggcagacgtgggccacactgcatcttccagggtttctctatgccacttggggtgcagtcttgagtggccagaggagcagtttgctgaggtggcttaagaacatgttttctcatctgtctgtgaccaggaggcgtttcgaagggcttgccatgtgccgactcagtaactagtgtgtggcctcccggtggtttcagatgccttgccaaggccgacccacccccctcctcgaggaaatgcaaaaagtgttttcagggcccagaacactaagcctgggatgatctgctcctccctgactggcagcctgtcttgcgtgggcggccgagctcgcagccaccaggacctgatggggacagtgtttcctggggcctctgtacgggggaggttctctcgagttgcaaaggtgcagatgcgccaggagggttcttggcccctaggcttcatggatagagtttactaggacaagcaaaggcctggtgtgcgatctgttttcctatttgactggatgttgggagaaaaatgtccaaattagggatgggcccatggctcagctgagcagaacactgggtgaacttctactgtgaaagaaatagcagatccggcggacatttatgggcgacagagaagggtagctcagcattgaggagggagtttggtctcattctggccgagactgtcaaatcctcggatgggcttgtaaaccagctcctggcctagcctcatcaaacgtgaggatgaggaagagagagcctggtgggccctggggaggggacctgcactctcagtgggacacctggtgaccagtaagcctggtccactgcccttcctcaccctctcgtctttctaataaacagaggggaggtgcctgtgcatagacttggggactattacattgactcagaaagaccctcttttcccttttgccccaaccagtgctttacgaggttgcctaagcctgtgctgcgacccccagaggcaggtgcaaccccattttacagatggggatgctgaggctcttcaccagggccgcccagctggatggcagtggggtgggtcacaccgagcctcctttcccctgggctgggctgccacccgaggcccccactatgtgttcctgtttgcctttgactccacgggggccgggagaaagtggcactggggatgccaccaggctgcttgtcaactggcctttgctgtgttccacacctctgacatggagatgaggctgtggtggctaagaccgggcggtgggccgagttcatgttcctgctatgccagtgatagctggacgagacctagagcaaggctgtgaactcttgtggccttggagttcttgtctgtgcagcatcctttcgggtgcaaggattgttacaagggttgagtgagctgttatcagcgaagcactgaacagtgtctggaaggtgacaaactcaacaaagtgtctctggagttagagcagccttcttgtggtccctggacccggcagtgtgctatgggcatagtgccctgcacagcgggtccagctcaagggacagggacaaaatgaccttttcagaagcgtgttaggaaacagcccgatgggccctaaggctccagaacctttgtgttccctgaatcctgaccctcacagggtccttgcatgaacttgacacaattaataccaagagagatggtgctgtccccattccacccctttgcatgtggctgaaggtcacaaggatagcaaatggaaatgcctccgcaaatcacctgtttactatttttctgattattaaagtgattgaaaatgtgatgactgtggaaaagcccaatgaacatatcattatgttcttccctgattccacctcccaaggatgaccctcactcacatgttagtatgtttctttccagttctttctttccatgccatacttcccttccaatggaaggttcaattaaggacgttaaaatacaacaacaaaacacacaaaagtaactccctgggcttttgaaattcaaagcttcagaggaaatggtacgaatgcaacccaaatggcaaatttcccatctgattttattttcagtacactctgaacccatcttctgccccttaccctagctcttcctcaggcaaccttgagtttccttctctaaggggaatcttgcaggagtggtctaggactgggaggctgagggggcattggaggagacacctggacaggtgtgcacagaggtggatgtgagaggtggatgaaggacatcccaacagggaacctgctcccaccccctgcacccccgccacccggctgtgtgtttcccaggcgaggctgtgtttgacatgcagcggccgcacaccgtctttggtatgccgtttggtcccggacttaatgagttctgcagggacgctccactgtagctaaagatcatttacctgaattgctttttaatttctgccgtgggaagctgcccccggtgtgatataattacattataatttacagcaatcccaaatctataaatttagccatacagtggggggaagggactggagttgtgtgtggggctgggggagaaatcccccccatcattaagtaaacccacgtttctgggtgcaggttccagtccctgggcaggtgtggaggaggcagagagggacatcactcgcccagtacacgctgaagtgtgctttaacaccacagagcattcgggctggagctgctagtgggagaggatgagagggtgatgtgacattctttctgatctgccctcttatagcatttttgctgtgggatgtggggagcacacagaagtgggtagcctggggacatctatggaatgcctagcattggaaggcaaggatcggaatccttccctgattctcttatgggaagatctcccggctgtgggctgtggagaggagagctgggcctcagggtggagtcccggggatgtctctgggcagatggagccactccctgggagcttgtggcatgtgcggaagtgaagccgtgtgggattccgataggcctaggcgaaggcgcagtaccatgcgggccaagggaggggtttcctttctgcacccacaaaagggttcacattcctggtggccctgccattccacgtcactgtgtaatttgccgtattcctgtaaaaccatgcatggaccaaaattattcatattttatgggcataaaggcagttcattaattaatggaattctatggtgaattaactttatttaacaaagaaagaaccaggtttttctgattcgtctgctctggagatctaaacgttcatatcttggggggattccgttgggatgactttgtagcagtgggaggcagtatagcagctaaagcaccagtggaacccaggttcggagaagctaagtcacttaccccacatcacgtagctggtggaggagaaaaagaccctgtgaaggctgttggatggggaaggtaagtagggggatagagagggaggaagagggaggcagcaacaaatttactcgctgtgttgaccttgactgttacgagtttgccccttggccagggggactgtgtggagtggtgctctggcagcagccttcccccttacaggggtgtgggcccccaccctgatacaggtgattgtccctcgccaccccgggaagctgctgatcctcaggcccaccctctgagctttggctcttacgttcacgagcgctggggctcagagatggcagaatggcggctccagagtgtccttccaggtgcttgtcattagccactgccccctgctccatctctggctgtaagcccctttgggccccctttgggtctacaccagcacctgtcaaactgactctgaggaggtcagagagggcaagtcatttaccccaaatgacacagctggtctttgaggatgtaagcctgtcctgagggccttgctttgagataaggtgtcccacagcctgatgttccaaccaagtgggacatcaggacctgaactcccttgtcagtgacacacctgacaaaggatgtccccatggcatttctttgttgttgttgttgttgttttgtcttgagacaggttatcgctcagttgctcaggctggagtgcggtgacacaatcgtggcccactgtagcctcgaccacccgggctcaagcaatcctcccacctcaccctcccaagtagctgggactacaggtgcctgccatcacacctggcttatttttgtattttttatagagacagggtttcaacttgttgcccaggctggtctcgaactcctgacctcaagtggtccccttcccaaagtgctgggattacaggtgtgagccattgtgcctggcccccatgatatttcttatagccattggtactgccatgatttgggagttttgggagaattgaagcaagtacttagaatctgaaagaatgcatttcctgtttaaggagcccatttatcactcaggttttacaaatacatgataaagcccaaggaaggcctggccctgtccacctgtgcagccactcactgccctcacattaaaacaacctcacctggctgtgagtgtgtgcttggctgtgaggagtgtgcaactggctgtgaatgcgcctggctgtgagtgtgtgctggactgtgtgcgcctagctgtgagtgcacctggctataaggagtgtgctcctggctgtgagtgtgcatctggctgtgagtgtgacctggctgtgggtgtgcacctgactgtgagtgtgtgcctagctgtaaggagtgtgctcctggctgtgagtgtgctcctggctgtgggtgtgcacctggctgtgagtgtgtgctggactgtaagcatgcacctgactgtgagcgtgcaccggactgtgagtgtgcacctggctgtaagctccttctgcccagatgcctgtcctttgcctgctccttccaggaaagctgccttgatgacagccctccctccatgtccccctcctggtgcttcctgcagacatcagatccctgtgggtgtcttctgacaagtcttacccctgcccctagggctaagccccaaggccaggagatgtttggataatctggccagggatcacaggagcgctccttcctgtggctgctggttcgcagatggccttgcacaagccttggctgctcagagctttgcactccagctgtggcccagcagtgtcccagggagggataggatgctgggtgagaacaccacaggcccttactgctgggcacgatgggaggctgcctggtgacggccgcctttgttatgacagagcagagcgttgggccgtggccaggctctgtccagagacagctgcgaggcttccaacccggctgggtggggtgggagggagctgtggctggcatgcatctgcatgcacccaacttagcaagttcagcatggaggagagagggagagaggggagaagctgagacagagaggggctgagtgcatgcagctgaagcagtgccctcgtcccagtctgaatgtgccagagccaggttgggcgtgagggtctgccgtcctgtttacatttactcgtgcctcctgtactgcaggctccagagctggagtttttattcagcttctgatgtttatatacacagttttcatgcacaggcccagaacccagccagccccctccctctgctgctgttcgatctgggaggcagtgtgcgtctccacacagaggagaccgctggactgcactctggaggaagtggggtcccctccgtgtgggaccttgcttgaggtgggcagaggtgctttggagtggtggagatttttatctcatgtatggtctttcgtgtctaatcttggcaaaagatgggattccctgcattgccgttttacagattagggacctgagtttcagagagcatgtactctgcgtcacacaggttggggaagtggctttgaacccaggcccatgggattccaatgcctatggcctcttgaccccaggcctttcgggaatgatttgagaagcaggcagttcagtccctctgtacctgcggtccccagtgacagctcagagcccgtttcagatccgcctgggcaacctgcccggctcccgcttcctctgtctccccttcaaatgctggcacattctccatagtgacttcccagcctgccacatctccccacaccccagccacgcataaccactggcggctcccgggacaagtggggctcccaccatttcgctttcactgtgtggtgactcccatgggtccatgagggactgctgtgtccccagctcctagaacagggcctggcactgcccatgccagtggtttgttgactaaatccgtgaccggatgagtgcttcagggacctctaggcttccctcagagccagcccagaaacacaaacatatgactatgttgcccagacccgtggctgtcttctttcaggacagcggagttggcacagccaaacccgagtgtctgctgatatgcttcttgctaagtggtgagcccggcgtctctaagtagtgcctctgcctgtgagcgggtgatgaagagtcagtggggattcatacccatactgtgtgaataggatggctactattaagaaaaacactcagaaaacagaacaggtgctggtgaggatgtggagaagttggcctccttgtgcactgctggtgggaatgtgaaatagtgcagccactttggaagacagtatgggagttccttggaaaatgaaacagaattaccttacaatccagcaattctccttttggatttagactcagaaaagttgaaagtagggtcctgaagagatatttgcacacccatgttcatagcagccttattcacaatagccaaaaagtggaagctacccaagggtccattgatggatgaatgaataaacaaaatgtggtgcgtgatacagagggctgttatgcagccttaaaaaggaaggacattcggacacagcacagatgaaccttgagaacgttatgctaagtgaaataagtcagtcacaaaaggacatatgctgttttattccacttatacgcggtccctagagtcgtcagaatcgtagagacagaaagcagagttgtgattgccaggggccggagggaggaaggagtgaggagttcatgttgaatgggtgcagaatttcaatttgggaagatgaaaaagctctggagatggatggtcgtgatggttgcggaacaacgtgaatgtactcaatgcctctgaattgtacacttaaaaggcatggaaatggtacattttatgttttgtatattttcctgcaagtttagaaaatgaaattattgaagagagcctgaggagcaggtctaaacacccatggacttctaaagcttccgtgaaccttgggtcctcctggttcctccaccatcgatgaccagtgtgtcaccccctggttcagtgccctctttatgcatgagagcagcttgctgggccaaggcccccgggccaggtggcttctctgaggaaacgttcgttagttctccccgctctctcaccagagaaagcacctgtgaggccagcctcttgtctgagcccctgcccggagactccgaggacattcgagctctcaaccccagacagacgctgagggtggaacctgtggaaaatatgttggttttagaaatttaaacctgatttttttctcctctgtgaaaagaatcaaaatccagcataagcttattacaggcggactgaggttattttgggaagtagcaattaaaggttttatatttttcctctcccttttgcccttgcagcttgcacaggtctgtgaagctattaaaccttcacccaacccacagcccggaggaatctgccctgccccgtttctcctccagttcagtgccttgggaaagaaaagaaagttaaattcgtattaattacagccaaatccgctcagtaagcacttgctgaatatgcttgaggatgaggtttaaagctctcctccaaacaaaacggtaaaatgaaaggaataatttatttggtcagacactataatttgccacgtcattccatttctcttgttactaaaatggattctctgctgaggccgtgacttccaactccaaaaaaaaaaaaaaaaaaaagatcatccacagccactattcctcacaatttctctgaaaggtcctccttgccccaccacgctgaagctaggcccagggctcttggaagaaacacacagcacttgctcctgcacactgacacactctgtcacccaaaatgacatgctgtcactcatactcacacaccacatgctcacagtcacacacgtacgcatgcatgcacacagggacagccacgcacctgcacccacccatgcacgcactcactgtcacacacaccatcaccacgtgcacacccagcacccacacgcacccttcatacacttatacacacatgcacacattcgcatgcacacgcctgcactcacacagtcacagatacacagggacacagagccccaggggcagtatgcctcagagcatgttagtacttccataaacgatctctttccacatcatttacagagtgggcgcattgtgagtgtcttaagtttctgaccagggttaatgtctttctgaggctgacttagctcaaaggcagtgtcatgattaagatctcaggcccaggagttggacagtgctagggctgagccccagcccagccacttaacagctgtgtgacattcgtcaagtagaaggagttcccccagccttagcttcccatctctaggtggtgataatgaagagttgacctcatagggtacatctgaggaataaaccaaggctgggcctaacagctgtttcccaggaggttctcatctgagttggctgatatcgtcattattatcaccaatccgtaatgctggtgtcccatccgttctccaagtgctgacttggctgtagctgtgggcccgggcctgggagaaggggactgtgtccaccagggtggctgcaggagggcctatgtgggccttgagatcctgcttcctggccaggacccattccttcatggggcaccttccccagttctcagggctgggggcactcagagggaagtgcagggctgagttcatgtaagttctgcaagcaagttctggtccctttgagtcagcactgtgctaggcattcagaggggagggggcgcatgttttgctaagggcaggtgtgcctgcgtgtgtgtgtgtgtatatatgtgcacgtgtgtgtaaagtttccttagaagaggtggcttttgagcagaagcgccttgggtgaaaagtgtagcaggcttggaagtcagagtgtgctgctgagtgagtgggagtctggtggaggtggtctttctaaccggccacaagaccctgggcccgctctgcccctccgtctgagtacctgccatcccagggggtgagtgctggctgggctcctggtgcagccacctgcaccgtgcagtgccatcaccgggtcgtgtcttgagcccctccttgccctcctgtttgtttaagtggccttggcctagctccctctgccctctgagggtctcactgtgccctagccctgtgggcatagtgcctggcacatagggggccctcagtctagggcacagggtgagtagaggaggaggttggccctgctggggcagcatgcttgccaagcctgtgtgtgtgtgggtttttgttcatgcttctgctggtgtgtacggagaagtgggcccagacacacacagacatacacggatgcccaccaggccccacgtccatccatgggaagggcagcacatgctggtaatgtgttccccaaacagcagcctcttgggctgcctgagctcagggcagagcagggacggggcctgtttgttggggctccagcagggcaggggagggcagagagtgtgagccctctggagaatgtgcaggtggctgggggagtgcccttcccagaacctcatggctggacctgtgagactccctgcccgtcctggtccccaccatgttccctctgttttctgggtgactctctctgcctcctttctctggttctctctgtccttctctgactttgttgctgtctctctcactgtttctttgtctgtccctctcttctctgtcattctgtttctctcacttggtccctgtcctggatcactctgtgtctctgtgtcttctgtctctgtgtcctggtttcactctgcctccgtatctctctctgtctctttttttttttttgcctgtttggtctctttgttttcctgtcattctttttccctcatttggtcctcagtttcagctctgcctgtctctctctctgtttctgtcattctctctctctctttctgtcatcctctctctttctgtgtcattctccatgtttgtccttctgttccctttccttgtctgtctctgcacaccaaggttgctcccagctgggaggttggccctgtcccgatgcctggcccttcttctgccaaaggcatcttggaaagacttgaggttattctggtgcattcagtccagcgcttgataattgtactaacctggcaattggcaagtgctcctcccaaagaaaaccctcacagtgcagggtgctctgctgtgggcaccaggcctccctggaggttacagggctcacagtgtggggacaggttgtccaggggcagctggagcatccactgggatgctgatgtcaggccagagggcacctgtgttttcctgggtgacaggccacaagcaggacagctcacacccaggaaaataaaagccaggctcagagtacttgattccttgttatggttggggatagtcagtaaaatagtagattccgttttgagagcagtatcagtgctctggggcctgtgaagggagctttgggtgtgctctctggttgtcacacagcccccggtggtgcaggttattgtcccagtctgtaggaagggaggtgcctcctggtctggtggctgggagtgtggctttaaatccagctctgattcttaccaactcacccaactctccaggcctcagtttctgcatttgtctgtgggttgttgtgaggattcagtgaggtcatgctcacaaagtacctgcgtggagtaaggatgaaatcaatggcactagtgtcagggctgtctcaaagattatcacttagtctcaggggctggagtgccagtgggattacctacgctggactgcgtctgctgcccacccatcgcttcccatatggggcaccacaaggcggggtggttcttggtttgttctttcaatcagcagtaaacaccaggtacacagcatggtacttgcttggtggagaggaatcagtgtggattggggccccagtccatgcccacctggcacagggtgcaccatctggtcccacaaggagtcagagccccggccactgaggacttcatctctgtgtcttaagagctcatcggtcttgaatttgccccctggctgcccctggcaagtgctggggcttatacccaggagacctggggtcaatgacttgaaaatgaagtacccagaaccccatcaccctaccccacagacccagaattttagagagatggcagagagaagaaaggaggtgctaggaagggttgcagaggctgcctgaggcacggggtggcaccaggctgacccgggcagcagggcctggggctgaggcccaggctgtgtcccttcctgatgcggcctgagcctgggcactggtcagtcatccctgtgtggcggagaactctaaacctcgcttgcttctcctctaggcacactcgggcccttgtaagggaacaatatgtccctctcccacccccagcccagggctgagcagacctcaggccctttgggactgctgcttctgcccagggtgaggctggctgtgactcttttggagtgtgttcgggcaatgagaaaatctgtgactttctgctttgagaagagacaaacctgggctggaaggtagctctttccctgcaggctgtgtgatgggcaggtcacgtcactccctgagccttaggccatggagtcttcaagaggacgggtgggctgttaggtggcagcagaccggggaaggtctggtcctccacagggcagcagcaggtggctcaggggctctgctggtctctttcctctctgagacccttcctcagccgggtgctggccaagaatagctggaaaggaccttcctgcctgaaggatgggatgtactaggttgtgctcagggaccaggtcagacatggaaacttggggcctggagtccagggacatggctgcccatggcctcttaccagcctggattgctctgggactcttcctctcccagcccacctccaggcctccttcattttcttctcctcgcctttgcctttctctcctgtccaccctcctgcatttcctttccctgtcctagctccttttctttcttcctcggcttgtgcctaaggcctccagggcctacgagatggtgtttgcctgttgcggattctcagggccagaggcagtatagctgggggcctggcatttggggagggttcctaagggctgtaaccccagaaacattccccctgcagagggcagtctgctccctccctgagctaggtgagggtctgcaatgggtccagaacatgggatctataccaagttctgggaaccagctcaacaggcctgggcctgcctctcacatctctgtgccctggctgtgtgaccctgggcaaggcactgcacctctctgagacctgtttccccatctagagcacccaaagaatcaggctgcctttgcagggctgtcatgagtggaagcctcatcccccaaccttggatgagcagacccctcaaatgtgcagctacccacagagattttgactgtccatggactttggtgttcagacatcacaacagccacctcccaccaccgaggtcagctcctgccacgcttctggtcatcaacaggactgccaagactcctgggctgggagcatcctttagctccccaaacctgctagctggcaggaaacatggaggccatttagggacattcagcatttgaacttaagatttgttttcagtagaacccacaaacccagttttaaaattcagttggaaaccaatccacaagtcttcaaagtcatcttagtgctgttcttaaacttgcaaagtaacacctagtgggtctgtcattggcttgtctggctcagctgaagtcagagctcacagcacactggcctaactctcagtctggcttcaaagtaacctgtgatgctgctgcacagctctgggggtgctcagtcccccgcccccaaccgccacatcatcttgcccagcatcctctgcacaatgtacaaaaatgttttcaaatgcaggttttagcatgattcaggtatggtgaggccagtagagcaggggagagttgccattgaaaagatgatttgttattcacacttcccagtgggaggacaccccacaccatacaggactacttggggaagcatcagggtcagtcagtgaggcatccaggggagagcatgggaaggaggcttcattggtttttgtggaagggctggcaaggcagggccagaagcttagggttggccggtttgaatgattctagcagtctctgggccataggggccatcgctctttgtctgagacctggccctggggtgttagggcagaggcatgtggcctcccagagtgtagagccaggtaggggagatggtttggagtatggactctggatcagttggtttgcacacaaaaaggctcactcctgggtgagtgctttgctgtcactcagccagccttgggaggggctgccttccctcagtcatcgaagccccagatgtgagaacattagaaacacagaaaacaagaaagtagagttaataccaatcatcaggagctgtgagatggggtctgggttcttgcagacccctttgttcacagaccttttcctggatttcttttgcacctggtttcagatgcctgtgtccccctgcagtgatggctaccgtgtcatccaagtcatcactaactttctgtggggggttatgcacaaggcatgatcctggtgttgttctggtttcaaggctgagaggtcgtgtgtaaggaccttctggtgcactcctcatgtggcatttcaggggctctgcaccccatgttctctgggctaaacccacatgggtcctcactcttcagctcgttttccactgtttgtgtgcgacatttgggtggagttgtgaccaggcagccttatcatttttggagcaaacattactattttgataaattgactggtttttgacaaacacaccaaactgaaaaaaagacaatctctctgagggaaggaaagtgatcatcaaacagtgaagaccaggatttgggggtggtatgggtggagccaatggtcttttagtggcattgctgtactcatttgatagacaaagaagctgaagcaggaaaagaagcttaggcagtgccccacagagctgcccaggagctgagcacaaccaataccaggctttggtgggagttgatcagatgcagccttagggaagattggctcccgttgttgctcaggtgaggcgtcagtcctcccaggccccagccagtcacaggcaccagactttttttttttttttttggagacagagtctcgctctgtcacccaggctggagtgcagtggcatgatttcggctcagtgcaacccccgtctcctgggttccggagattctcccgcctcagcctcctgagtagctaggattataggcgcccgccaccacacctggctaatgtttgtatttttagaaaagatggggtttcaccatgttgaccaggctagtctccgactcctgacctcaggtgatccgcccacctcagcttcccaaagtgctgagattacaggtgtgagccaccgcatcggcccagactatctgttttgaccttacatgtaactttgctctggaagtatcttaccttggcatgtctggtctttggagaacacacatatgcacagaaagagatgtgtgtgtgcgtttgtgtgtgtgtatgtgtgtgtgtgtatacatatatatttaaatatttaatattttaaccacaccaaagagatgtaacaaatacatgtacctccatgcagcttaacttttttttgccatttttagtctgcagcatgtcaaggtgggggatgttctgccctggatgcagacattagggagtgtgcattgtttatagagaattcaaaagcaataatcaaactggctaacagtttactatatgttattactatgtcctggcaattttaacctatgtcagtgatgacacagccctgactggggtagtctgatcccatggcccccccatctgggctgttaaaccctgatttgaacccctatctattgctcttccttgattccatcaccctcttctatctcctgccccccaggagtagcgtcagaccagagaatgttgtgtttgtcatccctctggcatatttccccgtttttactttatatgtaaatgcccatacagggtgggtttcaaaagttgattaagatgttatcttattatgtgtgtgtatatgtgtatatttttttctgtgcacaagattatgtttttgagatgtattcatgtcgttacctgaagctctgatttgctcattgaaagctccgtagacgccacaataaatgaatattccacagccgatttctctcctcgcctgttgaggtaatttacattatttacacttttttattgttgcagacattgttgccatgggtggcacacctccccctgtgtccctgtgggagaactttcttcacagcaggggtttataaaatcaatttcatgggaaacagcatttaaaaagatgcaatagaaaatatcacaatacattgcaagtattaaagttttgtcagactgttttatttatgtgtgtgtgcctgtgtgtgtgcatggacacctggagcacattgcaacacaacgtgtgtttctttctctgtatcacactgctcatttagaagcccaagcccagtggaagggtagatgtgctgggctgttgggtgtacacacttgtagctttgttagatattgccaaattgctctccaaagtggctgcacagtttcttcagcctcacttttcatgaaatggttgacaatattagactggaattttttccagtctaatagtgaatgatcttagtttcatttgcattctgctcttttgcaacgtattggacgtttgggctgcttctccctgatttgcctatccatctcctttgctgagctttttactgggttgctgtgttttcctgaaagtacttttaagagatactaatcttaaaaatcttaatcttaggccgggcgcggtggctcacgcctgtaatcccagcactttgggaggccgaggcgggcggatcacgaggtcaggagatcgagaccatcctggctaacacggtgaaaccctgtctctactaaaaatacagaaaactagccgggtgtggtggcgggcgcctgtagtcccagctactcgggaggctgaggcaggagaatggcgtgaacccaggaggcggagcttgcagtgagccaagatcacaccactgcactccagcctgggcaacagagcgagactccatctcaaaaaaaaaaaaaaaaaaaaagtcttaatcttgtttagacatgttataaataatttctcagtcttctgttggccattatctttgggtatggcatggtttattgagacaacggttgtacattttaacacagtcgagtgtatgattcttttcctctgtggcttgtgtttgtattttaggaggttctttctgtccttgaggtcatacggctattctcctattctaaaatttaaaaaattgtgcatttacatgtagcttttaaatttagctgagactgttttgtctttgacattatgtagagatcaaatttgttttactttatctatgtgaataatcgtctcagtagcaattattctatttcttaatttttaatgatttttttaaatgcaaaaactgtcacatgtcaattttccttgcatatgtagctctgtttccgggctccctactttgttcctttggtctattagtttcttctggtgccatctcacattgtcttaggtcttacagctttctgttaagcatggcagggaaaatcccctcatgtgttcctctttcaaatggtcttggctctttttctgcccttgttctaccgtgagaactttaggatcaacttgttagagtcctgaaaatccctgttggggttttgattataattgagttatttgtgaatgaatttggagaagattgccatctttgtcattttgagttttcccgcccatgatcacggcctttctccctatacttattggttattttatgtctttttgttttatcatttgtatcataagggtcttacacattttttgttacatttattcataagtattctgaagttttctttgctgctgtaaatgttatatatataaaatatacacacacatatatatatgtttaaaaattacagtttctagttcattattgctggcatctaggcatgtagttaaattttatatattgattgtatttctagcaatcttgctgatcttttactagttttaaatgtgtccctacaaattttatagacattttatttaatcttgtcatttacaaatggtgatagctttttcctttctttccaatttttctctctttagttattttcttgcctcttactgtgctgtctagattagcactgtctaataaaaatataatgtgaaccacatttaattttaaaatttctgatagccacattgtcttagtccactttgtgttgctataacagaatatcagactgggaaatttataaagaaaagtcatttacactcatgcaccccataacaatattttggacaatcatgaaccgcatataggacagtggtcccataagattataatcccatgtttttactgtaccttttctaggtttagacatgtttagatatacaaatccttaccattgtgttacagttgcctacaatattccctatagtaacctgctgtaggccagggtcaataggttccaggaagaacctatatcatatagcctgggtgtgtggtaggctatacatttagtgatgcacctagtgatgcatatctcagcacatatccctgtcattaagtggtgcaggactgtatttctcacagttctggaggctgggaagtccaaggttgaggaacctgcatctggcaagggccttcttgctgtgtcattccatcagcagtgagactgacccataaatttccattcttctccttatttagttgaattttcaactaaattaacctcataacatgtcctaaggaatgcttccctttccaatattcaaatatttgcataccgtatggattatcttcaaatattttaatatatttgtatatgttcatatttgtatatgtcaacgatatgttaaggattgttgtcaaatatttgtacatgttacaaagtttggaaaaacccaaactaccaaacctcagcctgggtttgttggtttcttaacgttttttaaaaaattactaattcagtttatttaatggttagaggtaattccagttttctatttctttgtgtcatctttcattcaaccaatcaatctacctctgtcttcaggaatgtgttcatttttcttgtttttaaatttagcagcagtgtttataactatatcccctttttcattctctatgttatttatttgtcccttccctgtttcttggttagtcttcacagagttttattttttatttatttttttgagatggagtctcactcttgtcactcaggctggagtgcagtgacacgaattcagctcactgcaacctccgcctcccaggttcaagagattctcccgcctcagccacccgagtagctgggattacaggcgtgcgcaaccacacccagctaatttttgtatttttagtagagacgtagtttcatcatgttggccaggctggtcatgaactctggacctcaagtaatccacctgccttggcctcccaaagtgctgggattacaggcgtgagccactgcacccagccttttcacagagttttattaatccttgcaaaggtctaattcaggagttggttgattctctttctcgtttctttgttttctctcttacaggtttcttttataatgatgtcattatatcgtttcctttctttcttaggtgtgctttgacattattttcccaattccttgaattgggcacctatgtgattgatttttagccttcctccttttctactcttcttgatataaacatatttctaagttatgcttcagttacatcccgcacattctgaaacatagcaattttattaaatttgaagccttaggatccacgtctttgtacagttttgaaaaatttccaccaaccatctcttcaaattatgcctttccccgcttctgtccattctctcttcctggaactttcttattctgtcttccatgtgtcggcacctggtttttatattacccatgtttctgttatgcattttctaatcctctctcaagctgactttgataatgctctttgtggtatctggtgactcttgtgtgtgtgtctgcatgtctgtgcatgcacgcgtgtgcatgggcactttgtaatttcagataatgagtggagatttatttgaaggaaacctgtgcagcatgagttaaggctatccctccaaagtgcttttctgtgtgactaccaggttcttcaggagtagcacagatgtgagatcaattttgtattcttttgatagcttaggggtcctggaccacatggggactataaatttgaaccatcactcagcgagaaggcaagcatgtggctacaaacactcagaagatactttttcagctcctctgcccgtttcccagcagaggcgtgagaagccaagcatcttggtgtgtccctgtgctggtgggcattgaagggtatccagcctgttactagagatgcagcgatcccatggcctttgcacgtgggggtctcggatcccccttcttgtttctcccagactccaggcctcctgtcctctcactgcatggtcgctaaaaagagatccactgggttactgaggccaacacccactcctgggctgcttagtgtcagctctctgtctggtctttggggtccctttgttatctggccctacgtggcctctttccttgccagctgaaatgtgcatctaaacagatgttcattctgtttattgagctggagggcctttagtttcccttgttgatcgtatggctgaaactcgaagtcgctacgctgttgtttttcctatgcaaaattaaaggtagaaaatgaagttgatggagaaagaaacacacattttgagaaagaactgtgtaattattatccactccctgcaaaagacccatgaagtggtcggttttcagaggaggaaatccttggcgtctgccttattccaaaatccactggctaagtcactcaccacctaagccctcttggacgaggaccaaggcttctacgctccatactaaggcacaatgtgagggattctacagagggcctagtgaagagagaggagagggcccatttcatctcactttgcctggggccatcctgcacgctgctctgctgtgtgatctctgcaggacacttgaccattttgtgaacacatccttatcagtgaactgctatttttgtaatggcagttccccccagacactgaatccacaagcttaaggtaagcttaagtcaagagtgatgacttcttgactattctagtttttctgtcttcattcatttcaacagtatttaccgagggtcttctgtgtgcccagcactgtcctgggcactgtttaaaacattgcttcattgcctctggtatgccaggtgctggcaggacagaggagaactggacttgccttctagcctgctcagagtatggtgggggagaggcctgtccctagattccagtgcagagcagaatgcgtgggccagttggggtctctggttccccagttgggaggaggaccattgcaagccagtctggagggtgtgtgtgtgtgtgtgtgtgtgtgtgtgtgtgtgtgtgtgatgctgggctctgggaaagataaatgaaggcccttctccttcactccagttcacttttggatgaactgttggaggtatttggcttttggtaagttttttttaaaattttattattttagctacagtaatttacatgattcaaactcaatagttacctatttgtcaactcaaaaaaaaaaaaaaaaaaacagacttctttgcttaaagttgatgagattgaaaccaaaaaaaattcaggagttactaaaggttatatggtgaaaaatctccctctcagccagccccctggttcccctccctggagacgaccaatgttccctgcctctcacatatcctttgcaagagattctagatgtatacacataaataaaacattatttgtttatatttatatatgtgtgcttacctataaatttacacacatacatacatatatatgttttttaatgcaattgtcagcatcttgttttttttgcatgacaatgtatcttggaaattggtccatatcagacctggagcgcttcttcatttgtttttatggctgtttggtattccattatgtggacagactgtaatttatttaacgagtctccctctgatggatatttagatttccaatcttccgctattttcaaacaatgccatgagaaatcatcttgccaaggtgcgtcccacatttgagagcatgtttgtgggatgcaggatgtagcttacagggagctcctggcatgccgatgtgagaaccgaccctccatagcaaggctgccccacatggcgtgggctggcctggcctctgagcttcctaagggctaaacctatagttacaagaattttcctaagcccctcagccacagatatataatgtgtagtttctgaatgagtgaatgaaaatacttacacttcagagaaattgtccttagcagaaggcataggacatagttttatttgttagacttacagaccatctgcctgtgaattcaaataatagttttcttgttgtttttgaaatgaatacattccatgagagctgcttactcagaccttcagtggcccagctggaagtctggttggggaatcattccctgggttgtacaagttggtgcaccagattaaagataaagtcatttatgatgacactaaaataatatgagcatcacatttggtagagactttgtttttgacgtaacccaagataagaccttatctgctgtgtgtacgggaaggtgcccttcaataaaggcctcattttccttttaatattccagaatgcagtgggagtgaatgaatgctggcagccagcctttacggagctacctccccaccaagatgctcccatttagtcctcccaaccctgttgttactgccactttgcagacacctttggctcaggcggtgaagtcactttcccaagatcccataggcaggatccataccaggcttccagccccgaggtagtgctgttcagagctgagcccatcactgtggctacccaggcacacttagaacttagacgtcaggacaagatctgtctatacttacagctgtacccagtctgtgttttggagttcacaaaaataacctcaaatgagattacaagggtaactgaggtgccgtttaaggacattatgtcccctgtttcttccatgaaaatattttgaaaaggaaagcaaataccccgctttggttaaggtctgtgtagtggattgcagggcagctgggactctgcaggttccacgggcgtcagaggggctctggatcagggaggagtgtggtttatttttgttgttgttgttttgagacagagtctccctctgtctcccaggctggagtgcaatggcacgatctcgactcactgcagcctctgcctcccgggttgaagtgattatcctgtctcagtctcccaagtagctgggattacaggtacatgccaccacgcttggctaatttttgtatttttagtagagacagggtttcaccatgttggctaggctggtctcgaactcctgacctcaagtgatccgcccacctcagcctcccaaagtgctgggattacaggcgtgagacaccgtgcctgtccaggagtgtggttttgctggagcctgcagtgtggtccccggcaggacccatctctcactgggcctgtttcccaccttttacatcagggcaagggtcctatctgatgtcaccaaagaaccctgagtagctcctagcagagggtgcttgacattttccctagttcgaaattagcagtcagcacacgtgtctgttaagggccagagagtaaagatttcagtctttccaggccatacgtatggtctctgtcacaactactctcctctgccactggagctcaaaagcagcatagatggtatgtgcatgatcgagcagggctgtgtcccagtgaaatgagcagtggacagatttggcctcaggctgtagtttgctaatccttactttgattgcctaatggcattagatggaatctgcataaaattagtacatccagccctacttgggtacaagctccatttcttgtgtctttatagtgggtgcaggtggggcttggagggtctccgtcccttcctgtcactttgctggctgggaaatcagaagaccaactgctaactgactagcctggagcagcctttgttgctctgaacctcactttccccatctgtaaaatgggaaggttggactatggtttctcaaagattctttccagctccaaaatgttctgaattctagttagaaaggaaattaacgttttcttccctggaggttgtggtttcagtttgtgtctttggtcaccaagacaaagtggatagggtaatttggtgttgtgatctgcaccccaaagggcacttactttctggggcaccccatcctagcagagacccctcagtctcaggagccagttgggtagggataatccttattgctttcttggcccacatagtgtcctgaaaataaggcttcacctgtgagttgctgcatgattccaggtgatgaacgttaacctctctagcctcctgttctccacctggaattgccccctgtgtagactgggtgggaggagcaggtgaggaaaaaaaggagaaagaagctgggcacggtggctcatatctataatcccagcactttcggaggctgaggtgggtggatcacttgaggtcaggagttcgagaccagtctggccagcatggtaaaacctcgtctctactaaaaatacaaaaaataggcagccatggtggtgcacgcctgtaatcccagctgttcgggaggctgaggcatgagaatcacttgaacccgggaggtggaggttgcagtgagccgagattgtgccactgcactccagcctgggtgacagagtaagactctgtctcaaaaatataaactaaaaatgaaggagaaagagatgctttggaaatgcaaacagcgctagggcttcattaagacgatgacatgtcttgtggttgttccaagggaagacatgctatacagggaggaaacatccccacttggcttcaaggaactagatcagtcctggttcagccaaggcccaggcacgcccacgtgggcctggactttctgccgtgctcacatgctgcagctgccagttggctggggctggctgcctccagtctccttctcagacactccgcccagttttgggtggcctggggactggagaggtgctccctgggagacctggaaagcaaacggcacagcagtcgggagccccggtcagcttcttgtgctgacttggctcattctaccactaatgaactcgggacactgcctggactctttcctgattggaatcatgggatggggtggtacccgcatggatacctctgtttctgtggcaaatcatccacttagtaaatattcattacttattaggttccaggtattgtgcctggaatacgtggtagtattatgtagatattgttgctgaggttttcctaattgccaggcatcagactaaatattacacaggttagcccatttgatcctcacaacaaccctttccaatttacagatgggaaaactgaggctaagtggaattatctaagtcagtcagctggttagaggcagagccaggatctgggtctgtaactggacatcactgggggctctgcctttccccaggtcagctgggagatgtcactaggggggtccgaagcacgactagacctactcgtgtgttgtcatttgtggagtgggcctggtttagatctcccccgtcagtcattctggtttcttgccgtggagtggcctcccttccaccttcttcaaagccacccaattggggtcattttcctagcttgctggatggagctaattacagcatgctcctggtccctggcccttccatgtgcatctgtctggtgagagataggtggagttctgggctctctgtttctggctgctcagcaaaaatcactcagaagaggttttgtgaaagcctttgtgggcctcagccataactggctgggcctgggaggtgcccaggtatctgcatcgttagagcaagctctctaagggggctcttcacagctgctgggtctccgggcagttggtaatttggtgtgggctgagtgcacaggtggtggtactgtacctgttctgcaggggtcctgaggggctggcacctctccgggctgttttccaacagcccctggtcgtgccgaagcacctgtcctgcctttctgttccaggccactcaggtgtaccaggtcaagaggcagccgtgtttggttcccctcaatgagtctggctctggcaaaaccatggctcaggcatggagctgggcagtcccaagcttggtcctcagccctttcccttcaaagccagttgggtgagttccttgacctccctgagattctcttttttcacctataaaacccatgtttctagctgcatctcagagttgctgtgcagatggaagcgtccttgtgttcagaggagtgacagtgaccgtgtcttcagcccaggccttgcacagcgcgggcaccgcagctgtttgtttgcagctcctgggagcaagcatgggttttagctgtgtctttccagctcctaataaagtcttggcctgtggcaagagctcagctactctggtttagtctccaggtttgggggttgtgatggttagaccgtcatggctttccttgcttctcgggggctctgcgtctgaaacaagaggtgcgaggagggcaaccaatcatccgggtttgcctgggacttagggaattcctggaatagtcctaggaaaacctgaggctctggcaaggaagaacagtgctgactgctccatcaggctcagcaggcactgtgctgagggctcgtcatcctgggatgggcccaaaacgttttaattttttaataatcggaagaaaataaatgaatataatccagcccagaagcctggattatattcgtctttaaaccaacacattagtaaaatataatttttaatgtgtcttatggaggaggaggtccacacaggtaaaagcgtttcgaggtatgagagggaccatgcagttctgggagagaccactgcacccagggaccccctgccttccacgtctcttgaagatcaggaggaagagaagacagccaaagagaactcctgcgaggctcctcctgagtttccagcgatggaaggaagcggagcaatggctgtttctgggcctgccaccgcctagaacttggattggggggttggtgaacttggattgggggatggattgggggattggattggagcaggctgaatgtcagccctggaaactgccactggcctcccagagtgagctgggagatcctggtgttcagatgttcctgccttggctgcgtggggggcaggggcgggggggcggtggttcctatttggagccagggagttgatttaatacagctgaggccaagacccagcgtggagcctacgactgcagctggatccctgccagccctctttcccagccgcatgtggctccaaatcccagaaagggagaaacccgctgtggggagggggtgcagcagatgtcactgtccccacatggtacttcttgtttatcttttattaaaggcaggcgcttaggcaggggcagtgctcagagcagcccttgtgagcgggccatggtggcggcctccctcagaagctgtgggaagagggagaaggcatgaataatgcaggctgcatcttgacggagcttgtccggcccccgcagaccgcgcagcgcgcacctgagcaagcactttgaatgcctctggcttctgaacttgagaaggaagctcccgggatgggcctgactccgccgcctggttgcaatagtcctggaaggggcggcggagcaagcagaagcctcctgccctggcccgtgggtttgcaccagctagaacgtggggctcctccattaagagctccttggcgttgggagctacgcagcctcacccctcatcttatcacaccaggagaccggcgagcagagtggggatggccacacagggagttcgcagcagggtggtgctctgcctaccgactcgcccctggggttgtccctgtcgcctcagcctttctctttattttgggtggaggcagggtactcaggacagggatgaaaacttaggtctgtttttcattgttcatcctattcttggcaacttttgcagaaggcgctggcaggaaggagaccctggggagggaagagttggaggagaaagaagtctccttggcacctttgcctttcctgctaaaaatggtggcagttctgcatttctactaaaaatagctagtcctctgtcaagaaggccacccacactggggtgtggggactggggacagcaagatgtgggccctgggccacacattctgtggagaggcctagaagctcacagatagtcacttttcttaggaagaaggaaggagtggcaggaaggggctgggatgccatctctggagagcggagcggcactcctgcccctgtgtgacaaggacaggtctgcacactctgtcatgtattactctaagtggctttaatattaaatggatgatgaaggcaaggataaacaaactgtagcttaccatataatggaatagtattcaaccatcaaaaggaaggagattctgacacatgctgcaacatggatgaaccccaaggatatgcgctaagtgaaacaagccagacactagaggacacgtcctcatgattctacttatatgaggcccctagggtagtcaaattcagagagacagaaagtagaatcgcagctgtcagcggctggggaagaggggaatgaggagttaatgtttaatgtgcacagagtttcagtttgggaagatggaaaagttttgaagattcacaacaatgtgaatgtatttgatgccactgaactgtacacttaaaaatggttaaaatggtaagtcttatgttatatatattttaccatcattttaaaaaaattaaatgggtgtcgttgattcctctcttcctctcaacctcccatatagaatgactagaatccaggtgtttatcttttatgccaatagtgatgatgatgatgatgatcatgatgatgatgatgatggcggcaattgtgttcttttgtagagaaagtaaggtaactctctggggtaaccagggcagaccctgtgagtattggatcctagtgccaagcttggagcactctggcatttgggggtctccctatggaattgctaaagctaccattggacaagccccactcatctatgcagaacttctaaccaagtttccagtccctcttctttaaatgtgagtggacacccagggtttaagtgacatctgaagaaaggctgctatgtgaaagagcaacgtccacatggacgactgggaaagcatggttcccaaagcagcggaattcaggaggagatgaaaatgtaaacagaaaattgacctcccacccattggtatcctcagaaaggcccaagaaagcattgcatccataaaacaagaacaggatgctatgaaataagaatatttggagaacaaaaaagagctttagattaaaaatatgatagttgaaataaaaagttcattaaagggatacatgacatttcatgaaaagaagaagaaagcaaagactggaacatctgaaaggaaagctgagaaagatgcaatacaaaggcaggtgatggagtatttgactaatggaagtttcagaaactgaaacagaaaacagacgggagaaggttatacaagaacaatacaagaaaattgcctggatcaggacaaaaatcttcacattaaaacatccctcagtgtgcccagcactttaaaagaaaaaaaataatttagacatgtgattgtaaaatttcaaataaccaagaataaagtaacgcttctgaaaacttctagagaaggggagaacagaacagaacagaacagaacaaaacaaaactaaacagcctaggtcatctacaaacgaaggaggactaaactactacccttccgatcaacagcagtgagtgtgtcaagtcagtgaatttgccctgggaaattagcaatgaaactatcagacaagctctcaggcagatgggaggggacaataaggctatcttcagtcatataggagggactcaaagcatttaccttctgtatatctttggcctttacttaaggattctctcttacagcgtaagggagtaagtgaatgcagggaagacctgaggtcccaggagggagacccccaagaagggaatgatagcaaggccggggctgtgcagctgccccctctctacagtcagagcagaggcttgagggattccaggggagggactccagaagagggctgcagccctggtgcctttggaggatcgggagctgctgtcatcactgtgcgagaggcaggggttggccttatacaccattctgtgtgtggtgggggaggtccaagtgaattgagttgtcctctgtataaataaccaataaatcagaaacattaagctcataggattaaagaatcaaaacgtggtattttaataccttccttatatagatcagatagctgccagaggaattaagagcaggaacattttttcaaagttaaaagtggttgcctccagggcacagggaggggactattgcctttcattataagccctttggtgctatttgttctttaaaaaatcatacgcagatcttttctcagccttttggctaagatcaagtgtaaaaatcatatgcaggattgcttagatttttttaaaaaaagaaaaagaatcatgaaaattaaaatgaaagaacttgcatgggccccagtttgtaacaagaactcattgggggtggactcagggcagcatggaacaggcctctcagtggtgttcctgggaccatgggctgggccaccttaagggaggtcatgatggctaggctgggctgggactggagtgacctctcaagtgaggagttttcagttctatgttgctctgtttggatttacttttttggaaatacacaaaaatgcagcccgtgggcccccagggccaggggactggaggtggcccctgctcttgttgcctgcaggttgtggttgggcttgtctgacatgcagcatgaccaggaaggctttgtcaaggctgctgtgtgcctggggtcattagatcctgggatgactgcctgtgacttaggcctggtccctgcccttggggcctggctggtactgaactggagtctggtgtagctccaggcagactgaaaggccccaccagggaggtcttcacactgtccccgaacacagaggaggcagtgagtgccagccgggcatcaggcagtgggcttgggctaaaccagtgcagtccccacctccctggcactcctgttcctgtgaggaagaatagacaatcaacaagtcaacacacaggtgaaacactttgagggagaggtgctatgaagaaaatagagtgggcatgagagggtaactgggagatgccccccactgggtactggggaaggcctttcccaggaggtcccatttgagaactgaaagcttagatagcgtgagccttaggaagcaggtttgcagagaatacaagcagtgccatctggtaggaggggcagcattgccacgtcttggagaaatacaccagtcaattgaggagtgagctgagactggaaaggcaggccagaggtgggacaaggagcctgactccacactaagggcgagaagtcccaggcccagagtgagtggggaaggccctaagggagttgtaggattagaacccagatggcattcgcctgtgtggagggtgaacctgagcttggagtctttcaggagttggagagaggaggaggacaggttggagcacatggagtcatccctaccctgcccaggcctatggatcgcacagagacggatgggcagagagtcgttccccatgcagcggggctcctcctgagctccattttcgggccagctctgtgctgggcttgggtggggccactgcaggccaaaggaggtgctgaaacacatagcactcctgcctacccccaccaggggtgccagggggacagctggctttccgacaggacccccagatgatatgtcgtgtccgtgccaatgaagtcgaggcaggactgagggacgagtgtgtttctgagggatggcatccaggaccagtgccagcattccagaggcagggccgcctgtaaacacagacaggggaggtagctgtttatgtggttggtttgaggaaggcttctctgcccacagatacctctcctgcctccccagcccactttgggatcaagcctagaattccaccattataggttcattcctttggcttgcaatacaaacatcccagtgaggaggtgatccctgagctgtcactggtactgagcaccccgtatgccttggtaggtcatcaggacctttgccattcaacaggacagccagccagcactcgctgtgcccagtgtgtggccactgtgatggttctgggtgtgtgaagagggtcaggtgctgtccacccactctgggggagacagacgcaggaagggataatgagtaatgaattctgtgagagagtggccaggaacagaggagcacagagaagacagcaatgtgcatccttgggcaaatcgaaaatcccaaatcccctaccctctctggccctcgacatgatcgctcaggagacagtagacgacactgtctctgcaaggcgagtgaaggccagcaaggtgctggccctcagagggtctttggcaaaggctttctgcgggggctggaggggggtaggtctaggttcagctgaggctgaaaggagggccaggagaccttcaaagggacagagaaggtgcaggcagaccaggacgaggaggttggcacaaaggtgtgaggcatggggctgccaagagcagtttgatccaggacagaagctggagatttgagttcagagaatgacacctcaggtcactagggactgggcctggggagagaggaggtgtcgtggaagagaaattctgtgacatggttccaccattggttctggggagaagattctcctgcagctcagaggggtctcccttgagaaaggccctgggcctgtctagcaggagcagcaggcctgccagtctgcaagggctggcatgggattgcaatgctgagctttctggctgtttggatctgttgtttttctaagtcactagtcccttgcatattaagagaaagaagagagtgaaacccaaaagatgacataatcatactttccttcattttccaatgaaggtctcccttttgcttttccaaattgttgctatcaggagaaagacgcacatggtttctgtatgacatgtgttgagcctctctcctcgcaggccccaggggtcaggtccccaccttgggacttgctttgattctcacctcctggcatctgtgtggggtgctgtctgaatggcatggttacaggtgcagctggctagggtgggtctaggggactgcatttgcacggtggtggtagtggggatgtgggtcccctatgagatggagcagcttgggggtaacagccaagatgtacaggcacttcctgtccatggtggcctgtggctcccccgagcccatttttgtctcctccttcattctaccagcatttatcaaacacctattgtgtatcggggctatagtgggaaataagacagattcctgccctcaaactgctcacattctggtggaaaaaaaccagccaagagtgtaggagttacagtgtagagaggtaagagcacaaaagggcagcccaagggcagggccgggagtcaaggagagcttcctggaggaggtgactcctgagctgagtctcagaagaggagcagaagtttgggtcaaaaatttctaggcaaagagtacagcaagtgtgaaggcagtgaccctggcaggccctgtcagttcacctccatcctctggtcacacttgggtcccacttttaagagggtctgcctgccagttccagccgcgcatagccttccctttcctgaggccgacaggatgtgtcatatcacctgcccagtgctgcttcaaggggggctgccccagtcatctgctgagtgtgtgagcagtcccctcccctgcaggctgtgacaatcaggggaaatcaggatcccagaagaacctttggaaccctgaggggctacagctgcagaaggggtcgtgtttcatgtcacccattatatttggtctccacgatgtgtatgttctgaggttttctgctttcaatgcctgggacacgcctgaagatgaggagaaaccagaaggaaggcatgtgcaccagaatggacttcttgagtgctcgctgtttgcctagcatggggttcttaaattatcaggtgcatcagaatcacccaagagacttgttaaacatgagattctgggctccatcctgagtttctgactcagtaggcctgcgatggggcttgaaagtttgcatttgtaagtccccagatgctgctgctgctgctgttggcccagaacacacttggaaagcctctggttcagcccagggctgggcactctggcctgtccagggccagcatggggcaggaccccttcgtgggctggcaggagccctgcacaccctccacacagagcaggctcccctcgaggtcatcgcggaatgaccctgatttcctcatctaatttgagaggaggtttatttgggcaggaataataaaaagcacagcaaatgagcagaggaaaacagaacccaccagacatgcaaactcacagaaataaacaatttgccgatgatcagggaagaggctacaggaaggagtttgtgcagacagctcctatgagaaaatggtccctgggaggtcccagagggctttccggctgcacgctgaccctggaggcagctgtcagctgtggcaccatggttgttctcgtgcttggagctgtcttcaaagccagtgagcgagccactcaagaaacttggttggtcaggtggcttcacagatgtactctgctttttacccaaacagtctgcacagtgcattgtccatcagcatgtgtacccagggagcactgtgaattcagggccctgtgtctccagtactcagcatggttacagaatgggtgaaggtgcagtgaagtgacaccctcttcccatcactaaggatattcacaaggtttaaaaacagttcccaaagcaggattcccaaagacgctctccagagaaaccgtggagccccccaggggaattgagatgatgaaactactgcgagctcacttttcttagggttccaggcactgcttggttttccatgcactggattatttaatcctccaacagccctggtaacagtcccataatcctcactggacagtgggggaaatggagaccacagaggtgatgtgatgggcctgaggtcccacagctggtaaggggtggagcagccttccagccctggctctctgaccctgggcctctgctctgagcctctgtgctgggcctcctctccactcaggaaggcacacatatgttctattaggttcattaaggaaaatcagttaccctatttaaaacaccagcaggcaccatttgtgcagcgcctacttggatctggggacctggattatctcgtgccatcttgataaaagcaaggtcactgtgcttgtccccagtttacaaaggggtcatttgaggctcagggagggaggtgacttgagcagggctgtacaactggaactgatccctgggctgctgactcctcagcctgagttctccctgctgtccatcccgcacttattttccaacacctcaggctgagaagctgcctgttctgcctgcctggcttctctcatgatgccagccaggagggagtgagggcagggggtgcccacctctagcagctcaggcaggttctaatgtgggcattggcagcgccttctgggatcagagctgctgtgccactcaccttgccaccctttgttgcaccttctagctccttcctgtggggctccaggttgggaatcaggcctcccatttatggcaggtttgggccgactgtgcccgggccaggaagcaggacggctcctaggtagagatttggatggggttctcaccatcatgggcctcgttttaaagtggacctgcccaccgccccgatctccactgcctgtagactttgcagtgtccggacctggctttgacctgggaccagccactgtgtaagggagctggctcagctgcctacagaacactctcatggcaccggaacctccagggccccctaatctccagggactgcagtcccgagccctctgtcattctacttgcctgaccactgccctcccatggctctgcagaccagcgctttcctgggctgctctgttggctgtcccactgcattcctcaggggcgtctgaagaagcctcgtgtggctggaatggggataaaatccagacggaaaggcctctgatgaggacttgggcctttggtgtgcctggctcacttcaggcctggagggagtagccctctctgggttgaactgggcccagaggccctctgatttatatcaaggtgggagctgcctgggcaggcagaaataataaaggtgtgggccggggcttatggaagatggggtggagggaaagctgggcagaaaagctcatccttccatgccttttggccatgctagcctaaagaccaggggaaggcttagagcttagtgatgcacccaagacgtgcagggctgtggatcttaacctctgaagccactgcccactctgtgggcagctgcacatcacaaagatctaaactgaaatggctatggaggaaagaggagtgaggtggggaggagggtagtgacagagagatgacaggaggaaatatcctgactagagagcttccatccattcaaccacccacctacccatctgcccatccacttacccatttgcccacccacctacccatctgcccacccacctacctatctgcccactcacctacctacccatctgcccacccacccacccacctacccatctgcccacccacccacccacctacctacccatctgctcacccacccacctacctacccatcttcccacccagccacccacctacccatctgcccgcccacccaccgacccacccacctacctacccatctgcccacccactcacccacctatccatccatccacccacccattaactgatccacctcacccaaacacccacctactcatcaacccatccatcctacccaaacacctatccattcatccacccaccaggccaccccgctatccaatgcatttttcatcaatcacctgctatattccagcattttcatccaggtcccacctcagtgtagcccacaggggatcaacccccccacccccacccccaccaccagtttctgatctctttttgcacgcacagcctgatggtggccctgggcccttgtaaaccctccttcccattttctgatactctgcttgtttctcctcgtggcccactgagatagtaagctccttcactcagagttgcggttgcttctaattccctcgcacctttcttagagctctccttggaggagttgctcagagcatcttttgtgggtcgatggaaaggttactgggaaacttcagttgtttgagactgggatcacctggcctctgtgtagggtggtcgaggtgagaagggagctcacgttaggtgaacacctgctgagtgctcagggggcgggggagaatgacagcttggtgctggggaaagaacccatgtttggagctggcaggggtgggattggttcccggagttgatgccagctgtgtggctttcaacaagtcacttaagctttccgagtctcagtgtttttatttgtcaagaaacaaaatataaacaaacctgaacaattaaatgcacatgtaagtactccttgtggtacttggcatgtggctagtgggtgatggtctctccccatgcccccgccatgtccatagatttgaagactgatcaaggctactttgttgagttaaaatgggcatagatgaagcttggctctgggtcagggccaagctagtgaacaacaatgggcagcctctgatgtttctggcctctcgcctccacccttgtcctgtctcatcctcttggccaccggcctgctagtcccctgggcaggatgggggaagagacaagctgctgagttgctggagggcaggatggcttggattcagcctgctgccttgctgtggaccctgtggctcaggccctctgtgcagcccagtggccggaggctggttatccataagcaggaaatggtggaggtgagctgagcatgagatgatgtcaggagatgtggggcaggaggctgggctctggggagggcctgcagtgctggggggcacaggcatttaatcaactgaattcccactgtcctctctccaactccatttattacctattaaataattatctcatttggaaagtgtttcttaatgtagggcagactctatccccagggccatgggttttgcaacgagttgtctcctgtgtgcgtgttccaggcttgggcaggaccggagcgttcttgccctggctgtgcctctgcctgaaccaggctttccggaggcacggtaaagcgggtgccccctcccctcgacctggctaatagcctcattacaagggttttcttaagcagtattctgtcttctaaaggggactgcctagggctgggcttctgaagttacttgctattttctgggactctgccttaggatctccaaaacgtctgaaaatgtcagggatgggagaggcctttgtcgtttttacaggtgaggccactcaggccctgagatcacacattgagttgatggcaaaagcagaagcctaggcctcccgcctgcaaatgcagagcttgctctgcttcatctccttttgtcttggaatgtcattggagcttaagggtggccccttcccctcttgaaggaagggctgtttcctgaaacaagagcagggaagctgtgttgagtgaatgcagctctgcctcacaacagccctacagatactccctcctttttttttttttttttttttttgacagagtctcgctctgtcaccaggctggagtacagtggtgcaatcttggctcactgcaacctctgcctcccgggttcaagtgattctcctgcttcagcctccggagtagctgggactacaggagcacaccaccgtacccagctaatttttgtatttttagtagagatggggtttcaccatgttggccacaatggtctccatctctcggcctcaggtgatccgcccgccttggcctcctaaagtttggggattacaggcgtgagccatcgggcccggccttttttttttttttcttttgagatggagttttgctcttgtcacccaggctggagcgcaatggcacaatctcagctcactgcaacctccgcctcctggcctcttggccaggctggtctggagctcctgacctcagacgatctgcccacctcagcctcccaaagtgctgcgatgacaggcgtgagccaccatgcccggccaatactcccttttttgttattaataagttatacagactttctagaacatgtgcaaacagtactgaagcacgtgtagaaacacaagccttgcccctctgtctgctccccagaggtcatggtggtggtcaggcaggtgcacgccctcctcctggctgtggtgtgagggtggattgaaggggaccaaggagagtgcatcggagtgcatcattaaggtcctctaggcaagaagcagaggtaatggaccagggtgggcttcagatttgtcttccagtttcaggtgtttagagtaaggtcaagcggtcagtaccacagcgtgccctgaggatggcttcggtcagttccagtacccccaaggagctgcatgaaggtctcacctcatcctatcacctaccctgggcttcttcatctgcagggtggggctcactgtcctcaggtcctgagattctctcaggcccccaacacaggccctggggctgcccatgatcaggccagctgtcagtgtccattgcagaagctcagagggccccctgggacttggctccctttcgagattctgggagcagactacagcagcggtcactgaccctggagtggtcacgggccactttgaggagttggatagcttgaaggatgaatggctgagctgcagggagagatctggggagggcatttcaggcaacggttctggtgggtcaaaagatgcaggagggacctgggtgtagcctgtttgcctgcaagaaggccctgtgtggaagaggcagggttccttatggatcctgggcctggcccattgttaacagggagccgtctgggactctagagcagtgagggggcagcccaggtacaagacacatggtgatgaggaaggagctagggtcagaccctggctcggccacttggtttcctgaggccctgcgtggattaccccatttctaatatggccagggttaatgtacctggcccaaggattgttgtgaaaattagagatccgttatggccagcacacaggagtgtgcaatggtgatgcaaatgatataaatgatgatgaatgaggcagaagctggaccactctgcctttaaaatcctgaagccctagatgcccaccctaatcatgagagctgtcatttattatgcaatgactgggtgatgattagagcccatttaccctctgcaagagagtctctatcacccattttacaggtgaggaacccgagtttcctgatgtctctgaggccatgtagcccatgagtgacggagtgcgaattccattctgtgctgtctgttcagtgtggttcatattctaccagactccagccctgcctgtgaaaccccatatgtagtgggtgctgacgtgaatatgaaatagcaggtgtgccccatgagagaagctcagcaggcccctgcaggcttcctggaggcacctcctgtagtatggcccttggatgggcctgctgcccctgtgattcagctccaggtggagcctgggaggggtcccagtcctgggcctgtggctggagtcgcccacgctatagtcatccagtctcctgtcaagatcttttgctcactcaacttgctttttaaaacaaaaaagcatccaagtggttcagtctccaagcctgggctgctcttgggccctcttgagaatttggacaccagggtttgctgattgccacagcagggattaaccctccacggcccgtggcattctcccagctcgctgaccctgggggaaccggggcctgctgagctgagccctttgttaatacagacgaaaaaggcattaacctgccggtcctgaggctgtccaccgcagaaatgtgacttccctgcctgcacgttaagtgctaatatgctcactagctggcctgtccaccccacagactcattaccgcctgaccacagtggaattgcagagccaggcaggggttgtgtctgcaggctctggcagctcggcagatttcaatgagatgatcgcttgtcatttcttattaatgagcgagtgcctgattcattatacatctgaggggtgaaccaccccagatggggaggaggaacacggagatgtgcaggcaccacagaaggggtgacgtggcccgtgtgtgagtcttttcttcctctttcttcctgcaagaaacaactaagaaaagctttcccgctttggcaggcaaggcttgggtgacaggctatgtaatggtgaaggggaggcagccccatggcaaagggaaattatcgcatagagggcagatgtctatgcaggagggcttccaaggagacctggaatgaatgtggggtgagccctggcccaaaggcatttgctaaatgtttgtggaataaacaaatgcctacacaggaaatgcctcctaacataaggatgcagttcgcccacccctccgccaggctcctgctgtgtgccaggcattgcacgaggtactggggacacagcaggccttgccgtctgggggctccagggactcctgggttatgtctgccctgccactaaggtatccgtgtgacttcaggcatccctgtttccttatctgtaaaacatgctgagctgtgcgtgaccccgtctctctgtcttctgtggggtggattggcaagagctgtgggagccggagcccttgtgggtccatcgtgagcactttgtgtgtaggtgggccggtgagggtgctgagctgggcaggtggggggccaagcctgggccttctcagatctttgaggaaatgcacaatatcttattcattatcgcttcactggtgcctgtgcagggcaggcactccgaggttctgggtgagcgagtgtggggttagcaatacagccaaagtggaaggctggccccggctcagagcggggctcctcccgcctaagaggacagcctgctcagacctccagctaatagggctggtggcaaattgtactttgtgttcattggtagcatgagattgtagctcgtatctctttccctccctggctccccagtcggagggagcttccagaggcagtggagcagctggggatcagctctgccccttgccagctgcaaaaactcaagtcttgggttttcatccatgttaacaacatctgcttcataggcctgcaaggtgaccagagcgcctggaaggggctattgctgtggttgagccattggaggacttggcttagacaactcacaacttggacttagtcaagaccaatgagaggacaacatgcctactgatggattaacaggagtttctgggagaccctggaagcatgaagcccacaagttccctaaagaggagcaattgcaggcatttctccggcagccgaccactgcccctcaggacccttgcatgccttggctccggccagtgcccgtgttgcccctggtcaagggctgcctgacccagtcagtgcttgcctcttcctgaccgcggtctccaccccacacctgtgattgcacaaccccagggctgtagaatccaccacgggccgtctctcctgctatgatgagagcctgccttgcttcaagcactaggactccacgtgaagaacacacagttctttattctgttttaatcagatgcttaatgattttcagtctacttaattactagtattgtattttttaaatagaggttttaactgcatctatgtagtatcttagccacaatgtggattatctgggcatttgtgggctaacatggaaagctactcatattatgttacattattttttatgggaaaatgcatttaagttccaaatcattgatttataatatgtcgacctttgagaacacagctcatttgtaagtgggaatagcctgtattcagaacaacataaagggtctgatatgtcctgggaacagcacagataagctgagtcacaggagggcgaggccgaggcagcccttccaggaagccttttgcttggaggaggagttgatggggctgaggcgtcaatgtgaacaggagagagggtggcgtctgctgtgtctgctgtgtctgcgggcatattagggtcaatggaaaggccagtttggcagcaaaatgacttgtgtgtggagggcggctggagaagtagacaaattcccaagggcagtcactggacttagaggttacctactgggctttggtggagccagggaaagttctgggtgtggagagtcctggtggcagcctgcaggaggaggctctgtgagggcccgtgtggggacactggtaggatgccatggtcttcctgcagggctggcacacacagacgggagggctgcttccaggaaaggtagttctgggagacactgtcccctgggacaagagcacacaggctggtcttgactgtagttttgttgcctggctgtgtccgtttcccacctgctgttttttacatgggttgctcagggccaaggcagctccagctgatcccatctccaacctctgcccctgcaagtcctgctctgtgcagagcccatgtgtctcgatggctgaaggtaggggtcgaatggggattggagtgggcttgccagaggcactcccaccctctcttttttttttgagacggagtctcgctctgtctgtcgcccaggctggagtgcagtggcacgatctcggctcactgcaagctccgcctcccaggttcacaccattctcctgcctcagcctcccaagtagctgaaactacaggtgcccaccaccacacccagctaatttttttgtatttttagccaggatggtctcgatctcttgacctcgtaatccacccacgttggcctcccaaagtgctgggattacgggcgtgagtcaccgcgcccggccccatcctctcttacctgagcagggctttggctctctgtgggtcacttgtatgtcatggaagggcatttcttcaaacccctcctcctctaagcctggctgaagagaaccagctcagaatcatcactgcctatggaaggcctggcccaggctgcagacaccttgggaaggggtctctctggagatggccgtggggtccagagagcagccctttctgtggggcattcactgttggggtccaaccagttctcttccaactcggtagtgcctcattctgagcctgaacattgccccagggaagctgaggggaagggctggtgatggtgccctgggattctgcctgaggcctcatcacttccatctatgggtagtatccggggctggggagcccgagccaggagggctgactaaacgtggctcgagtgtctgagcgcttgcctgtgtcagtggagcccttcgcggttccagagcagccactgcatggaggggagcctcatcgatgagctcactgcatgcaaacagtagctgggccaggtcctgctgtctgcatagatgccctgccccccatgtaacacagttgccacccgactactgtcagaaggatcaggattctgaacttaaggagttctgtcctcgccactaggagggacggggtccttctggcaagggtcccatcaggaaagagttggaggctccattccaccagcctccagcatggtctagttctcccccgaggctgaggaaaagtttggttcccttcccttgttttctttctgtggcctttgcggtgcccttggaggcagtaccacccaagaaggggttctgcttttcagttttgctgacccgggagcgttggggttgagctttttgtgtaagtgaccgggacaaacctctgatccctttgcaaccccatggccctatagaagtgtcgctgaagcagcgtctggtttgaccatcttctccccatccctgccatcccaggaagccacctgactcatctcaagggctgctgtatgccgtggggagggtatatgcggtgctcagatagtgccagccaacgcctgctcatgcagcccctctgcattcaaggctttgccatgcgtcccactccgggtaccccaggcaggccaggctctctctctggacctggcaccccccctgttcaagagagggaagagcaggccatttccagcccaacaccctgtgcctggggccagcactgcccagactcagagtggggatgcagttggtgtttatgggactcactcttgctccccatgctgaaagatgtccacagttccttcaagattcgaggaaggcccatgcaggcctgagctgatttcttggcttaagatggggtcccatagccccccgcctcctgcataagaaacatgtcttactctagaggcctcagcctgtgcttctgcaggaatgtagcagagggtgttggggatagggtagggctggagcttggccacagtcagagggtctcgggtagggacatggagtctgagcctgtgacgaggagagctacgggacaggtcagggcaagggcagcgggtggccgactctggagtgcccccctcctggtcagggcccttcctcccatcctgtcctgggattaatgtcaaatgtcttgtgcttaatggtttaatgtcaaatgtcttgtacttaatggtaatcccattgcttaaggtaagatctcccttttggggacagaagagctgtttttcatattcttgatgccttgagatcagatgcaaaagaaggtatagaatgccattggggtgacaaagagtgatgacgacaatagcaatgacccctccccaccccattatgtctcctgccatcccccacccccattagcagaaaatgcagcatccttgcacatggcacctggcagacagggcgggtggtgagtggctgagtggaatcagcagtccgggcagccctcaccagcgggtccgtgagctttggaggtgctgaggttccagtcttctgtttgattggaactccgtgtcccaaagtacttttcacgtgcccactccctgcggaagggaaaagagggtgggtgtgattttccacagcttgattcgaaagactgaaactcgatgagtgacatttcaggctggctggggatgtgggttcagatccccccatgacccctgtgtgtgaggagccaccttcacctgcactgcccgcagggactccacttccaggctctgcagctctcagtgccctcagggaactgcagggagccggctcagaaggtgcacagtggcctgggggccagtcatgtctttcacagccttgtgcgccttggacaagtctccctcccttcccgggcctcaatttccccttcttacccagtgggctgcctagtccacatggcccctaagatcccacccagcttcctcttcctcttggggccacagagtcaggagttggaggcagcatgacccccaagttccagaccctggagggcagccgctgcccctggaaggcatgccgacgtcagcttctcccgggaggcggaattcatgcgggccctagtctgagaaaggcacccgcagggtggacagcatgctgcccgccagcagtgtggctggatccccgagtccagccagcctttccgttagccagccagccagcgagcgctcctaaaccctggccgccgccggttataaatgattcatgcagccccgcctccctcggcggccacttgatgttccctgcgctccagcccggcggtccaccgcctctcctgccgctgggcagtgccgccgctgggcagtgccctccccgcaccgccgcccctctgggtgctgcgtccctccgccctccccgcacgctgggtaagttgaaggaggacggcagcttttccggagacgctccctggaaaggagtgctgatgaggccgctcttgtgtgtgaaggcctggcctgcagcgcccttctcccacgtcccttccccttgtctgctgcgctccaagtttgaagccagcaagcataagtaggcgccaaggcagggaggctgtgctgggcctcaggcggggggagctggagggaaggagggagggaggatgggggaggaaaggaaggaactgggtggacacagctggaggggaggagagagagggaatgtggggaggcatggaggcactgccgagaaaatggagcaagaaagtgaggcggctcctgcgtggacccaggcgagcgtgccagggactgggggctctggaagattcacactgtcagccgtaggcgttctttcctgcccccccagcctcccgcaacggatgtactccgagcccttcgaactctcggggtaccagtgagaactctgaactgagagtttcttctgagatccggcaaagccgagcttctgagagctcagtcttcgccacttcaattccccgcggtttgagctgcaaggaggactccagacaagaagctttattgtctgcgagtcccagctcacggttacttagaaaaacatgtgtgtgttaaaacagcttcccgggggaccatgctgttttcgcgtgaggaatgaatttggggaaagttaagtataggagagaaggaaacaaaatcatatcgaacaggaatgttctggaggcttggcaaaatctagaagacactttatttcatcgtcttttttctttgcaacatctatcgaatctttcttcttttgactttctaaagggctttacccagccctgccttctgggccccagaggtcctaaaagtgggaggactttttccagtgggaggtgatgctgcccctaaggccttgcagggaaggaacaggcaggggcagctggccccctccctcctggggacacttgcattttccctttgccattcagaaacaaagttaggtaaggaggtgagaccttcctgggagctgccttttgggaaatggtgattgtgacctcaaatcatgtcagagtgtgacttgctagaagagaaatggtcgagggaagagggggcgggtgactggaaccctcaggtaacaggtagggatgcagcagcagtgtcctggaaagacccttctgtgcattttgtggggagactttccaggccaaggcaaggagaacgtgtggcatcttctgagagggaaagaggagctcaaggaagaggggaaaggtcattgcccttggaccttgcaggaagcaaggtgcaggggcgggcacatcgtattggaggtcatgagatttgggatcctctcagtgcactgggaaggacatgaccaggtggttgtgtggggacatggctctagctgctttctggagacaggactgggccaagagttctctattctgttccattggtctatgtgcctgtttttgtaccaatgcttttttggcagggaggtcacagaggagaccatttctgggcctggaattcctgagagtggcctggccccagtggggacagggaggggagagaagcaacctggggcacacttccctagccagtcctatgtttgtgagacctgggagggctgtggtcagggggctgggccctgggggcaacagtgcctttgcatttgaacacaaagtgccacttggtataatgggcacagctcagtcttggctgttcttgagttttaaacaaatcatgatccccaccttccaaacaatttagtttttttcccctagctagccccatcacaaacttttgaagcatgaaatgaattttgctggccctcaccaataggatcctttccctagataatggattttatgaaatggccataatcctcctaggtaatgagcaaaagctacactctccacttgggtccagcattcctcttcctgatttatgatagattggttaaaatagtaaactgatagcagttgcaaaatagtcatcaatcaccaggcagtgtcgcttaaactacagaaaggtttccagaagtgagatgctggaagccagagagagaacaatttggcaataccaaaggcataaagcaccaatgaaatcaaatctctgtatttgtattctgaagacagaggagtagagtggctcagggtactaaggaaggaaggaaatgcaagcaaacccgttccccaaggtcaaaggacaccccctcctgagctccaggctgcagggggccctgcagggggaccttcagtccagggagttcttcagggggactgtccagagggctctgcagggtgctgcagagctctcaccagtaggtttagtgttctgtttctctttctagacagttttggaaagttttccaatttctaacatgtataaatatgttgggctaatatacagtaatggcttttaaagcaaagtttttcaaaagtataagaggattgaagtgcaaagctatcaaggccatgcccaggtctcacccgtgctccctcacccccttgccccttcgtccagacacctggcctgccacacccagcccaggacagaacttttctttcctcctgtacgctgagctgtcagaccatgagtgttcatcatgggctgaggtgatagttgatgctggagaaactaatgttttagggaccaaaacaaggtctgcagcagtgtttccatggaactgccttagtctggatgagtaacctcatggctgtagattacttgcatcatcagttcaggagaaaacattctcctccattggatgaatagatgaatgagtggtgagaagctgtagagatcttgtgtggtgtcaacgccctcatttcacaggggaggaaactgagtcccgagagagggcagcgacttggttcaggtctcagggaattggtgaaagagattggagtatggcctcagcggaggtgtgactgccagtgacacctgccggaatgtgaacttcacggatagcgctggctcacacctgtgttgcttagtgtaggctgctgagctgaccacttgcccttgattatttcaagtgaccgcgccatgtgccaccttcagacctgctcccagatcgatcccagagcctagggtgggactgtggttgctgtcatcataggtgtgtgattttccacaggtcatataaccctcttgagcctcatcttcctcttctgtgatatgagagactcttcctgcagaacctggcgtgtaatacatgcaacctgcatgcccaccttcagtccagcaagcagccatcaggcaccaattctagaccgagtcctgggccgccacagaaactcaaagttagataggagctgggtgggaaggcaaggaacactcaggattttgaacacagctgtcaacccctattccttaattgagaaaggcaaatcctgggacttgaataaggagattgggaagactcatggctgcactagtgcatgaaatattatggtaaaagcaggagaataaggcagtccttttcttagccctgttcttctccaggccagagcctgggctttaacactgactcaggcagcagcccctgcagaagctacctgcagccaggttggcctgtgctcccagagcccctgccatggatgtccataggagcctctttatcccaaagccatggcttccttctcaaagatagggctgtacttccctgctttcctggtgcccacacagctgtgcatggtggacgctccatgagtgtttactcagtgaggatgcacgggagctggctgatgttgagaaacggagatgagacttcagggctggaaaacacagctgcctgaacccacgcccaggcgtcacccatgctccctcgtcccctcgccactctgtcctgacacctggctggccacacccagaccaggacagaactttgctttcctcctgtgcaccggagctgtcagaccgtgggtgctaatcatgggctgatctgtgctcttataggtatggcttgcaaaggacgtcttttgttcctgttagagtagctaacctctaaatctatttaatacctcttccctggttgtccatcattatgacacatgattttccaaaggatttactattagttagcagcacagggctttctccctggggtagcagctacttgcagtgaagaaaatgcatgttcaatgtagcaatttgtctttttttatatatttattataagagtaaatgagttattgttggagacttcaatattattgcaaattaggtgctgcaaacagagccgggcccatttattatgtttctcaactcccacagcaagcctaccagttcagaaatcagctgagagttgtggcccttcccagggtgagcatggagggacccccggggtctgggcatgacaaccacgacgtcacattgtgccagaggcaaaagaaacaggagccacctgtgcaggcgggtgaggggccctggaagggagcacaaagtttgttgtgccaggtggtcagtggctggtgggctgacagctgtggtcagagagctgtaggaggtggagtgacctcacgctgtgacacttgctccaagcccatagctgtggtcatggagcagaggtgaggtggtagatgtttccagagtggcccctaagccatgaactcactttcaaggtattggcagtttaggccacagagactggacccaggttctgatttagggtgtgccccgtgacagagagtggtggctggaattaaccagcttacagtggggtcccctggaatggtgcactccccagtgaggagtggctgctgcctagtcctgtcctttcgccacctgcccagactaggggtggacacaggggctgcaggatgcatagaatgttagggtcctgcctaccagagatgaaggtcatactgcaaagtgggcatgctggctgtgtgtggtcaacaccaagaagtgggcaggctgaggccctggcatacagccctgctccatggctggaagagtccacagggaaggccacctagcccagtgatcaggagcacaggcttctggtgacaagccagcccagattggagtccaggtgtcgtcacctgctggttgtgtgattgcggacaagatgctcaactttgctgtaacctcagtgtctcttctgtaaaatggggctgataatccataggtattattggcgttaaatgagctcttgtgcttgaaacactcagcatagtactagcccatggtaagggctcagatatgtcacttgttcaattactattcagtaggcttctctgaacgtgacaggctaaactcgaaacattaattagtcacttcatttgatggcaatagtaataaatgtgagtgacagacacgaaagaggctaccctcagtgtaccacccagggagagccagagttaagattttggaatatatgcttgcagtcttctgtgttgtatatagtgtgtgcacaattattcacacacacatacctgcctgctttttacaaaatgggattatattgtgcttgctacctcgtaacctttccacctgagaatggatactgtcattactgatgcctttccgttcaagtttttctgcagttgcagtctcaaactttttggtctcaggacccctttataccctcaaaaattattggtagcttcaaagagcttttgtttttgtagtgtgtatttattggtatttactgttctagaaattaaaactgagaaatttaaaagatattttaaacttatttaaacctaatagtaatagacccatttcatgttaatgaaaacaaccaatttttatggaaaatatttcccagaacaacaacaaaaatgtgaaagatggcattacttttcaatttgacagacctctttgctgtctggcctagtggaaggatgcattctcctagcttttccgccttgggtctgttgcatagcagcctctggacacccacagtgtctattcaagagagaagaagagtgaaaaacacaaataatgtattagtatagagatagttttgactttgcagaccccttgaggcagtcttggggatccccagggctctgcagtctacattttggtccgcttttgaatgcctacagaatgtttttgaccttcccacctgaggctgggctgggaacatccctccagcaaccacaggctccccgagcctcctcatctgaccgaacctgtgtccacagagcatctgagctctcctctctatcactgtgaaatggaccgacataaaatctctcttgtttgcagagttcgtaacgacagagaacatttccataccttctcacaatcatctttgtggggagacagccaggagactgcaccctcttgcctagaacacccatgttgtggccagatccccatgtcgggaacctgctccagggataatctgctgcccccaagtcctgggggtctggttccatggggtttgctcatcttctaggactttggtcacaggggaacaatccaactcctgcctcctcctcaccccagaggctcccggctgcacacagctggccagagtgacggtgttcaaccgcctggtgcctccttttcagaaccacccctcccagccaacagagcccggtctgtgcgggctccgtgggtctgtgtgagagcccctgtttgccttggctttggtctgtcttctcaactggctggccggcccttttcaaaaatcggctgggtgttatgaaactttattttccaaagagaaaaatttctgggcctgtagcaagagggaaaaaagttatactaataatcaaaagcaccagtagtcaaagtaggatggtgagggtttggagaaacactgaaagttgtcacaaaacactgcagctcacccatcagccgcagcccccgtctgtgcgcagagccctagccatgctggcttctccctgcgtcagcatttggggaaagacggatgtgcctggaagcgggccttgctcctgtctgtgtagacaggccggcgttgaatgtctacgggtggcatctatcatccgtgacctgtagcatttgtgctttttgtttatggtctctcggcatgcattgttttctcggggctgaaatatagcacgctaatgaggtatctctctgctcaggaggacgcaggcagctcagaaagacgcctcggcagcatgctgactagtttgtcaacagccactcgctgtggcagctgctgtcccagccaagaagaaaagagtaggaaatgctaggagaagctgcagctgggggtggagggtactcggtgcctgggaacctcagctcagttgagtgtctgccctgcaggtgacttgatgtttggccctggtgccagtcatttctaggaggtatacgacttgggggtgtcaagcaaactaggttagggtcctagcttcccagacactttcggcctgaaacactcggctcctggagcctgtttcctaacccataaaacggtgaggtgacctctgcctttgtgggtgtctgagactcgccagtggcctgtgttctgtgctgggtaaatggcatcagggagcctgctggtggtgcctgtgcctggcatggggctactttgtatgtgcaggtgtttttcctaagctgggacctggggacaggcatgtgccatgcatgtcagcactcagtgtctgagcagagttaggctgactcagtgtctgttgttggctctgggtgctaacaggcacagtgtggacaaaggagcctggaaaagtggaccacatctagagggaaggcccataaagtgactttgggctggccatcatagcctagggattcaagctctgggaacgagagggaccacagtgctgctcacttggaggagggtatatggggaaggagcaaagtcctttctccgtggggaaatggcccttgaggctaggcagagaagaggacggtcttggaaggatttgcaaggagagttacagtagacacagcctgtcctgcagaccccgccctgtgccgagtgctaacggcggtgctaacagctgctgctgtttatggagcactagttgcagccaggcttctgcagacagtattcctcttcttcgcctcaggacacccttgcgtgtgttattacctataaattctgggcggtcaggcacgatctaaaccccaggaggattctagtggaattctctaagctgactataaaattcacatggaaggcaacaaaacgccaaagagccaggactaaaagatgacagtgatgggggatgaggtgggggggctggcctaccagatgctaaaccatactataaagctgtagtgattaaaacacagtgttgggacagaacggaggggccagaaatagagacaagtacaactggggatttcgttctcttttaacaaggatggcagttcaaatcttagggaaagaatggactgttcagtaggcagtgctgagacaattggttatggaggggaaaagttaaagccatgccaaatgctccttacaaaaataaatgcaggccgggtgcggtggctcacacctgtaatcccagcactttgggaggcctaggcgggcagatcacgaggtcaggagatggagaccatcctggctaacgcggtgaaaccccgtctctactaaaaatacaaaaaacttagccgggcgtggtggcgggtgcctgtagtcccagctactcgggaggctgaggcgggagagtggcgtgaacccaggccacggagcttgcagtgagccgagatagcgccactgcactccagcctgggcgacagagcgagactccgtctcaaaaaaataaacaaacaaacaaataaataaatgcaaagtggaatcaggagctgaatttcttaaacatccaaaatggtggcagtgggtctctccgctcagctgctccagcagccacacttcccccggaagctcactgatattctcccagcagcgaagataaatgagatcaaatctcaccaggaggaagatttaaaaatcacttaatacagtttaaaatactcaccggagaaatcagacaagtaggggatggcagaaggtggaggagggggacttttcttgcaggggtttgcagctggcagggttggaggagggacacaggtgagtcacatgccctctgaggaaggcctggctccactggggctttgtgtgccagctcccagtgggtcggcagggaggagcaaggttctgctggctctgctgaggccgcccatgtcagggtcaggcacgtggggtccgaggcaggtggaggctcattctgaaaaggcagatgcacttgcagaatgatgtttaggatttgggccctgtttgcacggccctttccgtgtccctgtgcttaactgtaggttccttgtttaatattcttttacttaagacgtgcccccaactgtgtaagcttcaggccccatggaacctgggctggtccactgctcactcagtaggcagcagtaagttggaagacaagaggcctgagaaggcctgggaggagcggggcctcggccttgggtcagccggtgatgcatttgcatggggcttggcccagctcctcagcatgaccttggggtggcttgcctggcctcccctcctcctccagcaggtcagagcctgcccctgagcactgtccctggagctcttcccagcttgcctatcacaccacatcagtctgaactccctgagatcagactgtggacccaatgcacagaccctgggtcacttatttgtttctccagggccttgtgtgtagatatttgagaaagttttaaactattttgatgtggcttcaaaatggccacgcatccttcaaaaaaaatatgcaaatacaacatacataaccgtaaagtgcatgcatcttaagtggagggcgtggtgaatttttgtcgtttgaacacatccacgtaaccagcacccagatcaagagacagaccatgaccatgagccgaagcccccctgtgcccactcccagtcactagccaccactcccccattttgggacaaccatacttctgacttctgagagcatagcttggttttgcttgcttttgttctttatgtcaatggaattatgcagtgtgtgcacttttctatctggttgctttcttatgtttaggggattcattcgtgttattacctgtagtcgtggtttgctcttcttattgttgaataatattttttcctgttattgtggatatagcacaatataccaacgttttctgatgttgatgggcatttgggttgtttccaatttggggctattctgtgctgcttatgaacatccttgtacggtctcgatgaatgtctatgtgcatttttcccaggtatatacctaggaatggaactgctgggttatagggggcacatgtggtcagctctgataaatactgccagctgtccaaagtggttgtaccaattgccttagttttgatactggaatttgctattaaaagatttattttctcgaacattcttttatattaacatctaggaaaaactgttgagatcaatatggatacattaaagtgttgactgagcctgggtccctgatgagaaactgaagaattgtgaacttcagaaaaatagacctgggggaatattctgtgattcactgactccctcacttacctatttgttcttccttcagccacagatattcattatgtgtatcctccctcccaggggcagagcaaggaagtcaagacaatcttttctccttacgataccaccgtcaaatgtattagttatttcttcttgccaataatggctctaactgaggaagcccatctctttatacaaaaaattaggtccaggaagagctgcctaagcagaatcatggttgcagtaaagtcactttatggtgtttaaagacttggctgaataaaggggaaagtttaaataaattagtgtctagctatggactgagacagtatgaatccactgaaatatttatgaagaatcttaatgacatagtacaatattaaaaggaaaaaaaggatacagaattacatacacagtataaaagttatttttttaaactcatatcctgtcacaaaaagaaaaaacacacttggtctcatttttctggttttaaaaatctttcggccaggcacggtggctcacgcctgtaatctcagcactttgggaggccaaggcaggcggatcacaggtcaggagatcgagaccatcctggctaacacagtgaaaccccgtctctactaaaaatacaaaaaattagccgggcgtggtggtgcgtgcctgtaatcccagctactcaggaagtcaggagaatcgcttgaacccaggaggcagaggttgcagtgaaccgagatcacaccactgcactccagcctgggtgacagagcgagactccatcttaaaaaaaaaaaaaaatctttcttctggctgcagtcctccagctcaccccttcttgcccaattctgttatctcagcatcctcagaagctcagtctgcgagcatggagaggatagtgtgtgtctcctccggcattgccccgtggggtttggaatggcgctggctgctggctgcctgggcctggcattagctcatggatctcggttgcggatcagtttccttccccaggaggggcagggacttcactttctatggcttatgtgctttcctggggcccagcatgaggcctttcgccagacactgtgcagcccagacttgttcccaggacaatgggtgagatgaaaaagggcttggtactagtggaggcacttagtggctgcagctgagtgttgggaagggctggagagtcagttgcagccaggtctggaggggctgtgtgcccagcttcagagcttgggttttgatcaggtttttgtgttagaatcctcattctggtggattggagggagccccagagtgaacatagagagacctcctagccaggcaggagataacctgagatcagtgcagtagttcctcacccgtgcgtggggaggcagcatgagcagttaggaggaggatggtgtccacagtggtcggatggcaccccagccaggccacggcgggctggacagcactctcaggtgacacgtggccacctgcctgcctctggctgcggccccaccacgggctggatgcctggatgaatctcaggctggagtcacttaacggctgggctgtcaccctgcagtaacccataattactacttaggagtttgtggacgaaaagcagtagattccaattgagtgtgttaaactctgcacgcgcctgttctaatgaggagcttgtaacctatgagagcccgtctgccgcgggaggcgggctcttgagccagagaagccagccagtcattttctccagcctctagctgagcctccacggccagccatatttcagcatttaggattttaagtgctggttaaaatgctcatatagggaagtgtgtatattttcatatttctgcacatcatgctagagacgagggtaggaataaatcggtgtggccagaggtgccgcttcaagctgctttattccctctctgtgcacagtgttaaactgggctgtgtctgacttcccaaccttcatcctgtagggggctgttactggggaaagaaagttgtcttaaaggaccctggagtgtgagggatggaaaagcgaaaggtttgtctctgcaaacaggtagtgctgagtggtcgccagcttagagcccgtcgtccagatgctttgttttctctctgttttacatgaatttccactgcacagccattggagttttgctagttgggaattttaattagagaattgggcaaacttcattacttttcattcaggtttaaggcaagagggctgattaaattcatccatcttccccaccgaagtccagcctctgaggtttaatcccattgcctgaagtccccatcaccccgccatcctccttcctccttccccgcctcgcagacaagggctctctttccaactccaccacctgttccagccccggctctgcccgcaggaggggaaaccaggtcacatctgtggtcattcacaaacaaacatagctctgctttgccccaccaagaggctgagcctgtggtttttctgtccaggtcctgaaacaccccagacagcaagaaaaccagaaaaaagcagctatgggctaggttaggacaattgaggtatctgcgtatgagagagattataaatgtgtacctcctggctaaagtatgtctttctctagcagaattgtgatttgaactgcttttgaaaattaaaatgttggtatgtgaggtgaaaatgagcttaatctggggtgttgaataattgttttcagccattgaacacaagtcccagcatagcatctacctagctacatggatggaaatgcaaatatccccccctgcccccaccagggagcaaaatgtgaaatttgtctttcttatttgccatccttcgaaggcagcaccccctgttaccatgataacataaccttgtgcacctccatttctgaatctgtaaaatgggggcaagtcactaaccttataagatggtcggtggaattaactaagcaaatttatctaaagcacctgacaccctttcaggcacacagaggttccaagatcttcaatgtgacgctttcaagaaaggcaactcaagttcagggcttctgaatcctactccaaataccctgtcatagtcaacacatccctgaagttccctacaccatgcctagaagcactgaggctgggcagtatctccttgtgaaaggcctggcccccttccccagggtcctgcttgaatgtcagaggacaggtggggaggaggatgggtggagaaggacagtggcagggaggacagtggggagagggcaggtggggggaggacaggtgaggggaggacaggtaggggagggcaggagtgggaggactgtggaaggtggacaggttgggggaggacagtcgtggggaagacagtggggagagggcaggtcaagggagggcaggtgggaggaggacagtgggggaaagacagtggtggggaggacaggtaggggagggcaggtagtgggaggatagctggggtggcggggggggaggacaggtgggggaggacagtgcaaggagggcagtttgggggaggacagtgtggggacggcaggtggggggaggatagtcgggaggacagtggggagagggcaggtgggggaggacagtgcgggggagaacagtgcggagtggcacggtcgccgggagaacagtggggagaacagtggggagaagacagtggggggagaacagtcgtggggacagtagagggcaaggacaggtgggagaggggcatgtgggaaggagggcaggtggagctggcggcatcatgaacttttggaatagcaaagggagttggggctctgaatgtcagcccagcaaccaaagatagctggcaacgaatggtccaggtcttttgggatggaatgtcataggggacaactaaggccctgtaggttgattccagaatacactatccaggtccagggtgcagtggctataacttgcagatcaaacaattcacaccacttcaggagttgaacttggctgtgagtttacgtctggtctctggacccatgtggctgcctacagtgaacttgacctttaggggctctggcttctggaaggagggagttccaggagccacatcctccttccaggaggccaggtgacatggacaacgtgagggaaggcagccagggcgtgaggccttgggttgggtctccagggcagctcaccacagggaaggagtgaaggtggtgaaggatcacccgggagatgctgcttgggctggagggcgcccgctgcaggcgtcagctgctgccggctgcgggatgtgatcagcactcctcacttcatggcctcagttcgctcgcctgtgaaatgtaggtgtgtgtccctggagtccctccaaagctctgtgaatttgtggaacgcagatggagggaaggtcaagcttgggagagggcggtggctttggctgcaacgcgaagccgacaagcactggcagcaggcctgctgggctgtctttgagcgcgggtgtctgggcccaccctcctctgtcggatccctgggtcttctgtccctcactggacatgtggatctgaccgccatccaggacgtcccctctgggtcctgctggcattactccagaaccacttcatcttccttgccctccagggctgagatagctggtttggtctcacatctggtcttaagtgggtcttttttttttcttctcattttgtctatcttaaaatcaggtttatgaaggtgtaaattacatatagtaaaatacacccttttgaggcatacagttctgttaattttaacaaatgtatacggttgtgtaaccatcacaaccaagatacagaacagttccctctccccagagcgggcatcctgtccttccgtagctgctctcccaccctcctacccccaacagcccctggcacactctattatgtttcccatccctataattttgccttttcctgaatatcatataaatggcatcataaagtatgtttagctggggcttttgagagagaagtaataggttccttccgtgggtttagccttttgtttgcatctgctctcatgaaaaggtctatgcttttatcaagcctaaaagataaccttggccgggctggtggctcacacctgtaatcccagcaagttgggaggtaaaggtgagcagatcgcttgagcccaggagtttgagacaagcctgggcaacatggcaaaaccccatctctattttaaaaaagaaaaattagccgagcatggtggcacgtgcctacagtcccagctacttggaaggctgaggtgggaggatcacttgaggccaagaggttgaggctacagttaactaaggtcgcaccactgcaccccagcccaggtgacagagcgaaaccttgtctcaaaacaaacaaataaacaaacaaacccacgataaccttgaagaagacagccgcactgtacaggaagctctggtgtgtgcaggtatttgtagagcatttgctacgctgacccgttaagtccctacagcagtctcatgagggtagttattattgtaatcctgtttaacagatgaggaaaccgaggctcagagaagtgtaatcattcactgtggtcacatagctcagatctgaacccacttctgtcatcctcactattctgtgtggttgtttggctgagtcttggatgagggatacttgcaatgataggtagcctctggcccctggtggtgggggtagggagtgggagagtcggagaggtagaagaaagccgctagatccaggcctctagcccctatctctacgggggactcccttccaaggaaaattgtctgtgctccagacccccgcagcagatgagtgtgtggaggcctgattttggagagtggggatttgcacccttccgcaggccacccctgtgttcctgctcatacttttgcatagccaccacctgaagttagggcagccccagccctgggggagactttaggggccaggggcagctcagtgctgggctcacaaccacagaacaccagctttcctggcctaggtcacactttgccaggccacaccatgaaggggagagagcgcccatccttggggagcaggatccagggtctgtgagacccaggcgtgggctgcagggagagtgaggtcgtccgcacggatggtggagtggacagaggccagcagaggctgcgcgcccatgtgcgggccaaggggagagcgtaggtaaaggacagtattgcagtcttgggaccaagtgccactaaaccttatgggtaatgggtttttcatcccctgggtaataggagacaccaaaaaatgaggacattacttagtgagtccctcacctccctggccccattcagcagactcggaggaaggacattgcccagcattgagccgtgtgtggatttaatggggtttccagctaaaccttccatcaaatttacggctgtgcctgtctcctgaccttccccctcacacattcttttcagaaatgaagctgtgtgcaggctgtgaggtgtcacttcccccacgctggagatatacagcttgggcctgggttgagacagtggatttaatcaggctgggtccccgcagttcacccgcccctaagctgagtgacattagggtggccgtcggagtccagctagagtgggcagcacggagccagcaagtgtttgtcctgccagccacaggcttctgctcagccttgcctcgcctccttgctgggagagtggcgcgtgggggcccaacatctgctcaccccctgggccggaaggtggggttcttcctgtaatcttctcccacagcccccacctcctaccattgctgccatggcgggagcatcatcagccggcctcactcctgctttccccactatcctaacagctgggctgctcctggctccctctccattcatttcttgccttccatcttggaagtgttcagtgtctgctgaatcctcccaccccaacctcactgcccctctagagcttattgcctttcaaatacagctcaaatatcacaacctccaggaggctttccccgatctcatcacccccagggaagagatctcccttctgcacatcatgcagaccgggtcctagagggtgaacctttctctgtatgcctttctctgttgctgggcctggcccatggaagagacccagtaaatagacactgtcattgtcacagggccatgttgtcagatgcctgctccagagagtgaagctgcagctacattgccaagctcactgggctttgtaaatggcccctcaacctcaaaggcagcagctgcagtctcacagctggcctctggggaggctgccttccgagggtggctcccctgagcctggccaccccagcctcggaaatgctgacaaggcctttccacccgtcccttctggggcagcgtgtgttttcatggcccttcactgactgatcccatgttcatctcaccgactgcctcagaggcctcggggcctggggcggggcagctatagcaacaggcagcgtccagtgcccactcggacacacagggcccttgaggcagctgctggcagcaggaggcgtctagcaggtgggcagagggactcaggcttgaggccacggggaggattaaaaataaaattgcctctgctccctggaagctgaggcctctgtacttggagttggaggatgacagacacaggaggagggagaatctgctagcaccaaactcccctctacctggtcatgtgtgggagcggggcctcacgtgtgggacactatcattcacattcaagtgatcattattatcacacagggccgtgagctaaaaccatacttctgtcattctttggctctaagaaaatgaaaaagggaagtaactccatttactgagcacctgttatataccagataattttacatgcattagcgtgccatcctcatgctggcctcaggaggtgagaacccctattctcatttttccaaagtaaatttgtgtgtgtgtgtgtgtctgtgtgttttggttttggggtttttttttgagacagggtcttggaacccctattctaatttttccaaagtgtgtgtgtgtgtgtgtgtgtgtgtgtgtgtgtgtgtgtgtgtgtgtgtgcgtgtatattttggttttgggtttttgttttgttttgttttgttttgttttgttttgttttgttttgttttttgagtcagggtcttgctgtttgcccaggctggagtgcagtgtcattgatcatggctcactgcagccttgtcctgctgggcttaagcgattctcccacctcagccactggagtagttgggaccacaggcgcgcaccaccacacttagctaagtttttaaattttttgtagagaagaggtctcattattttgcccaggctgatctcgaactcctggactcaagtgatactcccaccttggcctccctaagtgctgggattacaggcatgaaccactgggcacagccccaaagtgtttatgaaagggagtggcagggtcagacctgcgctccagagagctcatactagccttcctgaggggcgtgagtgggtgaggcagaggtggaaaggctgggagcctgcttagtgagctgctgagacagacaggaaataaaggggcctggagtgggactgcggtagcctgcatgctggccccaagccgcacctggtgggtggacccagggccccaaggaaccccagacgttgctggctgggtggatggcggtgcccttgctgaggcaggagaccctgcccaggagcaagcacaaggtgctgggagaagatgccacggtctgtctgtgtcaggcgaggcacatccaagatgcctggggctcacgcaagggctggacggagagatccagggctcagaagagagatctgggcccgagacgcagatgcagaaacacatggtgaaaatactcatccaacacactcacgtttttcctccgtaggtgccagtgacactgtgggaagatgcctggcttcccaagcacacctcagacgctggcccccgatcaatgcctgtggtccttgaaagcagatggccagatgccctgcctgaaaactcccacatggcaagtggtagatgtcacaagccacagagcaccccccgcccacaagatcccccagcctgcttgtgggagggaacatcccattctggtgcttttgatctcttcctgcaaatatgcagctcaggcgacctgggaatattcccccacagtgaacctgaattgatactcaccaaattagatcaattccagccggagcctggagcctgtgattatcaccctctcaccgtgctcttttccttgctgggctgcgtgttggatttccaaaaggcttgtaatcaacagcagagagagctatgtatagcccactccccgcgctggcgaagcccgggaaggccactgtttgaggttaggcttgagtcaacttgtaccatgtacttgggagccattcaaaagaggcggtgcacacacaaatcatgatggggctaatcagaagtttgggtatttagtgggatatgtacacagcaatcattgttggaagcgcccttctcccacagaggccattatcccggagcggggtgctgtttgcctggttttgtctgggccacaatttgcattcacttgatggattgtcagggtcgggggtctcctccttgggaaacagtggagtgactgctcagcacactcttaagaggaaggggagcgctaataccagcgtttgcccaggtccttgagagggcccggggatcctaacgcagtgctagatcaatatgacaggcgctaagaagcttgggacatgcattcacaaaccccttttattgctccactccaagccagggagaggggagctgcagcttgggcacagctagcaggacctggccgacaggctcttgtttgttttcccggctgcggtggcctgcggttcagttcaagtttgccaaagtgatttggagtggccttccccagctgagccttgcgtgggacctgttaagcccctgctctgtcacctgccttctttctgtctggctggatgccgaaaagaaacctccagagggagaagggagtcggggaggggtagaagggaggcctgttttgcccgctggggcaagggcagctgtttctctgggggtaaacactcttagttgccaaaatgccctgcagttgagtgatgttgctttctcgtttggcaaggcgagaggtgtttttgttttatttttggtattttcctgggacatctgtgacacctgttgactccatgagttctctcaatctcatcgtccccgagcattaggaacaaagcccaagggttccacattctctccttttgaacagcaccgccatcacttttatcttcttaattttcagggtgttttcttctcttcagacaggagagaccctgtgcagtgtgattcaggggagagtgggcaccagtgagagacacacaggccgtgagggccatgttccctaacaaacagtgtttggtgtggacagggcctactagggtgtggtgggtggggagattgttgagtttttttttattgcaaccagtcttcagagcaatcagggattttcttttctttcttcgttcagaaacgtgtgaggaaagctgactagcatcgacaatgccaggtttcctctgttgggccttctattcagggtcgctgcttgcatgttccagttctgggtcaggactcatggtcagcgttggctgacatctcagtagcaagtcttttttccaggagaacccaacacttcaaaggcttatcagttagtggtgacttcgtgtttctagttctccatgttgatggctaaaatggagacagttgagttgtccccaagaggggaccaagtctttccttttccctgggggtggggagggtagagtgaaggaggcccaggctagacggccgtgaggactctgtccagaaagggcccctccagcaagggtgatgggttgggcgctgcaggaccgcggagaaacagaacgcatctttatctggtcctccgaaagaagtgcggtggccatagtctcctcttttagcccttttctgcccctgtgtctcagaaaagtcttgaaagggctggaagtctgtgggtgatgttagcctgctgagatgctcgaggaaactcaaatggctctttctttgtatcacgtctttcctgtcaactcataccccaccttgagccagccctcagaagatggttgcaagagacacaccttgggtagtaaaggtggagaaagaatgctttccagttcagacagtcagctcctccatcgaggaaggatgagaaatcacagccttcaggatttcaggccaggcacaggactcttagacttgataccataagcatgattcataaaaggaatgattgacacattggacctcgccaaaatcaaaaattttgctcttcgaaagaccctgttgagagggtgaagagacaggctgcagaatgggagaaaatatttgcaaacctcatacctgacaagggactagtacatagaatatgtactcaaaactcaacagtaaaaaagaaacaatataattagaaaatgggcaaaaaacagaaagagacctttcacaaaagaggattatataaatggccaataagcacatgaaaaggtgttcaacttcactagccattaggaaaatgctaattacaactgagcgaggtattatacacacatcagaatggttaaaagaaaaaatattcataatgagaatgcagagaaacaggagcactcacacatagctggtgggaatgtaagacggtacagcctctctagaaaacagtctggaagcttattataaaggtaaacatactgcataggacccaacagttacacccttgggcatttattccagagaagtgaaaatttatattcacacaaaaacctgtacacaaatatttataacagttttatttgtgatgtccccaaactggaaacagcccagatgtcttttcgtggtcgagtggttagacaaactgtggcacattcataccagggaatactactcagcagtgaaaagggacaaaccatagatgcctgtaccaatttggctgaatcttcggggaattatgctgagtgcaaaagccaatcccaaaaggttaccaactatgtgtttccatttatgtaacatgtttgatgtgatgaaattttagaaatggagaacagatcaatggtttccagggtttaatgacagtaggggtgagggagaggagggcagcagaagggtgctcatcgtgacagaactgtttagtatcctgactgaggtggtagatattgaatctgtacctttaatgaaattgcataaaactaaatgcacacacattcacatatatatatatatatatacacataaaactaaatgcatacacattcacatacatacatacctgcgtgcaagtaaaactgaggaaattagaacaaggcagatgcattgtatcactatcagtatcttgattctgatattgcactgtagctttgcaagacatgattggggaaatctaggtaaatcatacacaggatgtcttcctgttacttcttacagctgcatttgaatctcaaattagcgaaaaataaacaaggtaattaatatatgcaatgcgaattacgtcacgtgtcttcactagcttgtcctcaagtaagcaagccgtgctgtttcccaaggggctgggcctccttcgggacatctatgcttacctggaggctggtgggttatagcgaggtgggggcacgggtccccccaaagcttggcttcgtgaagctggtacccaggtagtggggaggagagaggatgtgtgtcctccagttctccttcagtcattttcacctcttggagtttgcatcttggggatggcttctcctaatgccttcccaggactgtgttcatttgttcattcattcattcatcagtccatttgtcagcagggatttcttgaggacccactgggcaccagacgtggagcccacagaaatgaaaagatggacctttcagcatcagggagctgatggctggtggggagcaggcagtggcttgaatgccacacaggaaggtgctatgggagagtagcaggcacccctcacccaggagtgggtgcactgggcggggtgtctggtggataaagaagaaatcggggagccttgctggaggtgatggtgcttgtgttgcctgttgaacaagtgggtgtaggcagagaaggaatttcttgagaggcagtgttgcctagtggttaagagttggctgcctgggtttgaatttggtctctgtttaacttctcttcttcagtttccttttccatgaaatgaaggcaaaaagggaccctaccttataggcatcgtaatgtggatcaaaccagttcacatttttcaggacctggcccatggtgaatgctgggtaagtgtttgataaattaaatcacacaaatagatgaacgggcgtacagaatgtgattgaagcctgggctatgctgggagaaatcagagctggagtacaggctgtgaagggaagggggagcagcaaagggcagggcctggctttcccctggatgcttatgggcacctctcctctggggagccggctatgctcctggctccagtagagtggagggcaccacacatgctttctttacaggggaaggcgctgttcccttctcttccttacttgccctttccatgcaccctgaccccactgaaaaagcagcagagaggggctttgcacaccaggctgtcctcatttactcagtccagatacctgggagattgtgagaagctggatgcaccttcctggaccagcgacccctctttccactgcactccaggtgtgaccaatgccagtcttcactgagcacagtgggtgaagcccccttcccatcccaccccaccctgcaccttgtgacctcctgcttggctctgcggattgtggtcaccaccttggactacttaaccccagcactttggacaaagcttgacatctgatcaggtgctcattaaaagcactgtcccattgtcgggcccccatccacctctctcccccgtcagccagggaagggaagatttggtctctttgctcacgtgacagagatgtccccacctttttgacctgttgaaggttcttctgggccacaggagaaacgtttgtttcacgagaggtttctgcaggtggtgggcctgagccgcctgctctgggaggactgaggtttgggctgaggaactacgtggtcattcggtggttgatgtggagttggaagcccttgtgggaccttgggcagggcacaggcctctgtctgccccttggaaaagtgggtgcataaatcctgctctgtgcataaatcctgtcccagctagccaggggctgcagaggggagagttctggtgctggcccggtaccagcttggatggttagtgtttgtggcaggagccatcatgctctgcctctcctgccgccacctcctgaccactttactggatcctgcacctgcgtgtttgtgcctgaggggctttttcttgctgctgcgctggtggcagttcagggtgccaggaaattaacactgataatcagtaaccctacttaacaaatgtctatggcagaactggtgtgtaaataccccagctccctcacccctcagctgggtctactctggttctcagaagttctgtgtggagctcagctgcccttgcccagagtggtagggggtgtgccattgtccctgattcaccaccttcggtgtctcttcctgatgtcctcagctgccctgtcatctccaaaataaaccacttgcactcacatccttgtctcaggttctgcccctaagagacccaaacccaatggggttgttgccacttttctgatagatgctgtggatttgaagtcaggaaggatagaccaccgctaacccgaggagtgaccgccagtgtgaaatgtgggccatgacccctgcctggcagagctcctgcccccagcgtgcatagttatgagttatttgactaaggcatcttgccacagccttctcaaatatctcagcagctcagcctgtcctctgtagtttgggaggaaggctgaatggccaggaatagctggggcttctatttcttgtttcctattttagtttttgtccttgttgttggatgacgtggagggagaagggtgggctcaaggtgaataaccaagcccagcccctgaagggagagttcttttcaaaccctggtggcccctgcccgccccccagcctcccctcccccacctggggtatgtgtgtggctctggcacaattaagattcttgctgggtgcccccagcccccgctggccccgctgctgagcagcctgtcttgaaggatcttctgagaacggactccttttctgggagcgtttataagagatttctcatggctcagttcccctatagaaaaccaggaattgtaagtcttacatagctcaagaaagaaagtgaagggagtgagtcagagccggccaagaatgagtgaacagggttggtggcagtgtctcgggaggaattaccaaaaaagaaatgaaaggaaaaaagaagaaagaaaaaaaaaaaggaaaaagaaaagcaaaaccaagttccccccaaccccccacaaaacagaaaaaaaagataaacttttagcaaactaatgtggacagggggcctctgaactccctggcaaagcagttgggcgaggaagcggatggttttctgggtcttcaagtgcattctgcctccttagtccaggcctttgtggacctggtctgggggaatatttagcaaagttgtttattttgcataaacccgagtaatgacccagccctaggggagggaattgtgtggggctgacagcagcgtgatttaagggggagccacctgacccctgcccctcccaaacgtcccctgcagaataaactcgctttcttcccagcccgctgcatgttaatcaatgccgaaggctgaggcccgagaggcctattgtggggacagtcgggtcctcctggggctttgtggcagctccagctgagttcctttctctctgctgctcactctgactttccggaaaggccccaatctcaccctggagctcagcttgctttcctggttcttcccaagcaattgtccgtctctcagatctgtgcactttttgaaagcaaaactcattagtatattttttaaatgtgtttttgtgacagatgtcccttagaaaggacaccccttagaaaggatagctgcctggggcccgcgtagctgatagctgcctgggaccggcgtggctccgctgactcaggctgggtttcagctacgcctctgggggactttagccttgagtatacgcagcctgggagtctccagtgctcagagtgcctgctctgttccctcctgagcattctgttcccttctcactctctttctagagcgccagtgtgggatcagttcttactgccaggggtgggggctaatctgtgtcttgtgtccttgaggaccacaaatgaagacatgcattaacccttgggggggggtaccagtgatttcaaaccgcccccccataaatccccccacttccattttacctctttcctcccatatggttttcttttctttcttttttttttttttgagacagagttttgcccttgttgcccaggctggagcgcagtggcgcgatcttggctcactgcaacctctgccttctggtttcaagcgattctcctgcctcagcctccggagtagctgggactacaggcgcctgccaccaagcctggctaatttttgtatttttagtaaaggcagggtttcaccatgttgaccaggcttgtcttgaactcctgacctcgtgatctgcccgcctcagcttcccaaagttctgggattacaggcgtgagccactgtacccggcccagtatggttttctttctagtgcctcaatgggtgcctccttgaggacctggctgatggggaggggaggggaggggctccccggtggaggcttgggccaccaggctgtggacactgcatggacctcagccatccctgcaggctggcctggcttccctctgtgtcagcctttccagcgtttgcagccagcaattctctccttggaaactgggagggaaaagaaaacaacaacaatgaaaaaacaacaacaaaactaaacgtgtgaacttggctgtaagtatggagcagaaaagttttgcttggatgtggcactggggaactgatggaaggaacagtcctttgttagaaggggaggaaggggaagtgaagtagtctctccttagaattggggtgaattgttatgaataaaaaatacatacttctcagggctggatgcagtggctcacacctgtaatcccagcactttgggaggccaaggcaggcaaatcacctgaggtcaggagttcgagaccaacctggccaacatggtgaaacgccatctctactaaaaatacaaaaagtagctgggcatggtgacatgggcctgtaatcccagctgctcgggaggctgaggcaggagaattgcttgaacctgggaggtgaaggctacaatgaactgagattgcaccactgcactccagcctgggtgacagagcgagactccgtcacaaaaaacaagaacagaaacaataacaaaaacaaaacaaaaacatgcttctcagtaagtttccctgggaggatgggcccggaacccagagacacttcgtctggtcactggtctcccctcgtcttgtaatcccttccttgcctctttttaaaaggaaaggtttgagcccactgtggttgctatggttttctaaccaacaccttgatatttgcaaagggctctgaagtcattagagctatttcttgctcatcacctcctggtgagacagatgtgactctcccctcccattttatgggtgaggaaactgagattggagaaggcagacaagggccagggtgtcctggagctgtgtgaaggttctagggttgtgattcatcaagccaacagttagaactgtcatagttttcctgtccctctctgtccctgagtgatcttgggcaggttggttctcacctgccttgatggtctgtggatctcatagcattaagtgtggctcagatttctccctcccttctttcccccaccctctctccgccccaccctgaggtcagcctgaaggcagccccctagccccaccccaggcctagtgggagactcagacacaccaggggtgtgggtaggcgagggccatgaccccagaaggctgtttggggtccagagggagcccagaggggccctgtcttccctgcctgaggcagggtgggatccggcatgtctcagagatatgagtattagccaggcccaccaagctggggtgggggggtattgacagtaataaggaggtggtttctgttctgaagggtgaaactctgaaggccctagtgctggtgtggtggtaacagcagtaaaaattttagcaccaccaacaactggcattttgttttgaaggtggaagtgtcaacaggtctctaccatggcttcctttgaaaaacacacatacacacacacacacacacacacatacacccacccccccacacactcacacacacccatacacacacacacacacacacacacacacacacacacacacagccttcttcggaggccttggccctttttctcaaggaatccccagcttgggcgttaatccctcaagagtcaccaagagttaactcttgagaagctcgtttattcatttttaccctatgtagttctacaggcagcctccaaaaatgcatagtgtgtaacagggctgaacaaaaagtggcggagatcaggggaaagaaaaaaaggggatcatgaaatagaaattaacaagttgaagttgaggccagtgcttgcctaggggcaggggaggaacgtgtccacctctgtcccaggtggcctgtgtgagggagaggggctgggggaagagattcctgcactgttccccatggggctgcctgcgggcacatgcctctccccagcaccacccccactgacacgctccagccgccacgccctctccatcacaaatgtggccacagctcctggtcttgtccgggtcagcctcagaagtagcaaactccccgtgttgacttcctgttaggggaacgaggattccatcctttgagtcctaaacctctgaaacagcatgggcccctgctccctggctctgcccagagttgtcagagattcagagaatcgtctctcagttttgctcaagagcctgaacactaccgctttcctactaaaggctaaaaataaattttgaagcaataaaggtgatcacagtagagacagttctccacttacaatggctcgactttactgtgggtttactggggcatggtaagttgaggagtaaatgtgttactttgtaaggagggcaaagattgtaggcacagggtttttggaggccaggggattgattctgttgggtttctagtctcctctggatgacatcaccaacctgaaatcccttacctgtgtcataacaaaggacactttgtgtaattttcttagatactcacatctttaccactctattctggaaaaaaatacccatttaggccttgccgttaacatgtctgatctcaggcctgaagatctcttagagactcagtttccctttctgtacaatgagtgggtttgactgatactcatgctgagctggtatcttttatcctgtatttatataacatggtcacctctttagggtgctaacattttatgagacctctttaaggtgctaaagtctcatgatatcatccagtaactctaccccatgaagggacattttattactcattaggcatcaatgtcaggttcagcaagtcttatcttgatgctgacccttgggaactgcacctttctgctttccaccgttcagaggagttgatacactgtgattttcagtgaagggggaccacaggtccccttcacctgtggtcttttcttgttgctgttttgtggagtggtttccatccaccccctactccctcgaaattagggttaaaacgcaatggcataaggcactgatatagattaaaacacacacacacacacacacacacacacacacacacacacacaaaatgattgtcataaagaaaatcattccagtcctgtgagtttgggattatattttccccagacatttactgtgtttatagagaaaaataaatatctctgtaaacatgtgttgtatttacagtgaaaataaatatctaaataaatattaagcttttaaaattggagcactcgcagaaggaaatgcaaatggatgtgagcgagggctgcctcacttggggcgtgcatgcctggattcgcactgaattggggtgcgtttgtctttctttccagctcggagtgcagagccatgcttcagggaggggaaatgaacatttatggagcacccactatgggctcgacactttacaaagagagcttcattttatcaccacccggctctgggtggcaaggagtatctgtgttactttgtaaagagggcaaagattgtgggcacagcgttttcggaggattctgttggtttctagtctcctctggatgacatcaccaatctgaagtcccttgcttgtatcataacaaagtgtcctttgttattttctcagatagagaaaatagatgaggaaactgcagctcagagaggtgaagcgacttgtccaaaatgacagttaccagttggggtagctggatgttgttctcacccagaatgaaagagcaagttatggaacaaatctgtacatggctgctggtgctaagacttttctaaatccaggaccagggttagaaaagccaggagctatggcagttgtcagcacgtggcacctccagacacagaaacgaaagggtctgcggtggagtcctttttcctctactccctccgggagggcctggctgctcacgcatttacgcctctctccaaacactgggtccttcactggaaactcctctgaaggacagcaagcctcctgcaccccgccaggagagctctttcctggagatcaatctgcagagagcaggctcattgtgagccattgtgagccagagcaggctgcagctgggcctcatctgtgcatttgtgttttacaagcaggcgtcttggtgggagatgggttttgcagatcagtgtaatatagaagcaaacacttgaggatgggagggagagcacgtttctcactttaggggtttgcttccaggacttccttttttggaagtatgttctttttctctctcatacacacttgtgtgtacacacacatacacacacacacacacacacacatacacacatgcacacacattccaccccacagcctgttcctcaggctgcagcttccccaaggaaggcgagtgccccgagcctgctcctagctgagcctgcgcaaggccatcagccagtcttgtctgggtcgaaaaggtctcgttggctgtgtgatgcaacttgcagtgaactgagggtgactgtgggcgtcacagcagcgtctcagaaggccctgttcagccctgtctgggacctgtatataacggaactcagtctcacctctgcagaataggaatggcggtgcccatcttcctctttcttgtggctactctgagggttaagtgaagtcatcgatgaaaatacgctttagaaatgaggtttgtacagcgagtgtaaaggcaggctgtttttctaactggtgtccaagccaggtgtggacctgcagtaaaatgcaaatgaccctgttatgtggacaggggccattgtgacagtgagctttgttaggattgctgcatcacccacaagcctgttactgctgagccccaactccagcttctgattccaagggcctgggaaggtgcggaggatttgcgtctctagcaggctcccaggacatgcagaggctgccggccgggggccacactgggaactgctggggaaagtttgctttactttgagttctgaggcaggcaaggcagaagaggcagaatctcctgggggtgggagggtggttacaaaatgaggccccagcttgtttgcagcccccattgcctcttgaatggtggatatcctggctgccttgctcttttcccttccggctctttcttgttccttctttaacagaatatatcccttaaaccagtgcttcccaaacttcagtgtgcaaaagaatcagcccaggatcctgctaaactgccagcttctgaatccacaggtccaggatggggtctgggagtcttcattttaaacacacaccaggtgatggccactgctgcagctgctgaggagcaaggaccaaaacaggcagtttccaaatagtaaagtcacttctgttttgcaaactcagatggcattttctccatgaagctctcattacctagcttggtgaccctgtgcataggatctgagaactcgctgccttggtttcccttctgcaccctagcgatgttaacccttggccctatgagggttctgtggaagaaacaagatgaggggacaacacccagttccttttaggctctagataaacattatttgctgtcttcttctgtcttttactttcacagcccctgggtaaaatagacaagggatgtgcgtggagacggacattgtatccaaaaatcggaggtcagtgatgttgagcggtttgctcaggatggtagaggcggctctggaggtggccccacatctgctgacttccatgttcaggttcagagttgtgggttcagatttcagaatgcggatccatcagagaatctgtctggtcactcactttcctttgcacttttcaagaatttgatcctttttctttttaagagggagaacagagccctcttggctggcaggtgtaaatcttcactttggggtttgtttgtaccagggtatgttctttctcacacacccacatacttaccctcgcccccacttgcataggtaaacagcttttaaatgtgtattttctttcaaaataaagccacttaagctttaccaaaatgcactgctgacatggaattcacatttggcaaacccctgccatccgtgttttactgagtgcagactattgtaaattaagggaagtcactgtgtgtgtgtttttttcttccagactgttatggaagcagagctggtcctaagtaaaagataaattatggcgggatctaaagaggcatcatttaaaaagtgtcaggatacaattgggttcttaaaaaccatgcagagctgctaaattcacatgaaaattgagtggagctggattgcctggggtgacagcgtccttggcattgatttatcccatctgtttggccggcccatatgacttgaggcctctggtggagaggcggcttccgctgggccggtgctgctccgtggcctctgcaggtcttcctggccccagcccccagccaggccactggggagcatgaacaggtccaggggtcttcatagaccactaggagaaagacaccaatgaaaggcaacatccacggagtgcacatcctgtttcttattatttgtgatagaatccttgcaatatcgtcttaaagaatgattctggactgaatctaaccacttcccccttgttgagcttttagattagattacctacaattgtttggtattagaagttctactgtgattaaaatctctgttccagtgctgtttaccacttagatttttaccctggagtagattaaggaggtgagattactgacaaagagtaactgtttccagcaaggttcttcacaacactcttttcagcattgggtattctcatttttaaacatatacttgtaattttttaggtagaaaatcgtattaatttgcaggaaattcagatttgttgtgccttttttttaataaaaagagtgttgtggagactcaatttggcagttgcgtgctggagccagctcataccagctaacaccagcttgtgagagctggttctacgcatctctcccaaactatatgctcagtgtcttctccttggtaccttgaaatcagccacagtgagagcatttacaccatggaaattggcacatgctacaagccattgacacccacccccccccacccccaaccccttgccccattgcttcccccaaaagctggttgttaacatgtgtcagcataccactgcagctatttaacaaccggctatagaggacttgctgggaaaacacacaataataagaaaagcctagggtccagtgagagaagaagcaatggtggttaatattataataattgacactctgtggccaagggctgtatctttgcagtactcatcgggtgtagtgggaggggaaacagtcccttcaaggtttgagtatttcaggaaggctttgcaggagaattagagctccagccagattccccagagtgtgcaaaataaggagggaagggggaatgaaggctggaggtatggtgtgctcatgggggtgtcaggaggcactcattccttgttgtagatgatggccaaaataaaaattccagctggtgctgtgaacctgaactttgacattagccagagccctccagaggctgtgctgcccctcgccgggtccctcctgggtgatggccatgatagcaggatgctgtgcacctcctgttcctggcatctggttcctattttattagaggttggagttcaccctcagcaatctacagcatgcatgcatttcaaaggaaatgcttaattagtccccaagcctgggcttctttaggctcccaaggagaaatgaattttgttgccttgatggattggggaggacaggtggagctctcaagtatgtttgtaagttgcagaagttgttcatttggagactgtgggtgtaataaatggtatgagctgaggcaggagagggaagtgagactcaagtgatgaatggcagagggggcatttattgaagccagttctccatggcaggatttggggccagacaacatgggggaataaactttttttaatgcaattcagggccgggcgcagtgggtcattcctgtaatcccaacactttgggaggctgaggcaggtggattacttgaggtcaggagttcgagaccagcctggacaacatggtgaaacacgatctctagtaaaaatacaaaaattagccgggcacagtggcaggcacttagaagaattgcttgaacccaggaggcgaaggttgcagtgagctgagatcacgccactacactcaggcttgggcgacagagtgagactccatctcaaaaaaaaaaaattgcaattcagacagtttctttaaacagtccaccagcctcttgattgtgggttctgggtgctagtgaccctccccctgagagcccccaggcaggcctgggcctcactgagagagacaaagtcccactgtcagttctgactgactgtccccaggaccctcagccttagatccctggactttggcataaccacaggcaggttggctaaggatgcctgagaaaaaatagccaggctcttggagtcagacttagctcgctggtcctttatttcacatcctgccttcatttccagagcgggtactgtgcaaggtgggtgagtctctgtccacttgagatgcagggtgacctacacaacacacagtaacatctgggtggtgacagccaagtgacaagcagccttcccaaacccctttgtgcttcctgcccttggctgctgctgttctgcccctctttcctgctgagcccagatgtgttcctccccaaggatccagagggatgaagaccaggaacttatgaagcgggcgggtgactgtggtgacttcacatgggccaagaaactcaggggttcattgctgcaggtgggctttcaggaaggggagattggggaggggcaggtgggcagtgcagagttttgggggaatataacaagcatggagtgtgatccaagggtggggaggaggctgtccccctcccccagctcacctcatccccaggcatgtgtttatcccatgaggacagccatgggcagtgggcatgtatctagaaatggtgccaagagtgactgggaggatggagacccctgagttctggaacattctaggcccttctggaaagagcatttggaacaccaagcagtatccttacctgtaggacactgagatggctgaatcagttactgtaggtaaaatcattcatggatttattctttcactcattcttcattccttgagcatgaacctgtgcctgctgtgggggcagcccaggaccagtcttcacccagatgctcgttctaaactctgcctgctctggtgggaaggcagggccctgggctctgagagcctgtcggtccctggctttctgtgacctcacgagctctgggttttggttttctcccatcaggagaacgtctgcctggcacctcctgggtgcaggacagggtctgtgtgaacatgtgtgagccatggagcggcctgccaagggaagtggcactgtgactgaggaaggacccaccttcccaggaggagggacccacctttccaggaggaggcgcagctgttctcaacgccccctgcccgatggaatccactggggagctttttaaaacgctggtgccctggagccaccccagagagtctgcttctgtactgggctgggttttggcctctcttgattccctggtgtttctcctatgcctccagagcctgcgatctaccaaagttggaaaataaaggaggtgaggtgggggtggatgatgtctctcccaactctattggcccctgtgcttcggcctctggcccagcagagagaagggagggagtttggctggtgtggggcagggaggcaggaaggacagagcgcctgagctgcaggctttccctcagccattaaagtttatcgttgccacggacagtgattgaaaaaggctttttgcaggactgaaatgtgagcaatgaaacttgccagttggtaccgacacagggcacttatctcataaaaatatcctccagtgtcaaaaggtttcagtaaatgtggctggaagtattagcagtcatttctggcagcctcaggctcccttggggcctgcagtgaggggctgtaaaagggggctctcagttcctgcaaagaagaagggagggagggagagaaggaggaggggaggggaagcccaaactcagcctactgctgtggggaaagtgctggatcctctacggggcgccccacagcatcagtgggggtgcctgtccctgtgcatactccagctgctgacttggagggtgggagaactgcctaccagaggggccagcgtgccgacttccagccagccagggagtgaggttatgggtatgtgatcctgcttctgctgacctgcaaggaggaaatggagactcagagaggttgggtgatctgcccaaggtcacccagctgttaagtggcaatgtcaggattaggaagctaaagccctcctcctttccagacgctcagagcctgggatgagttctctgtgtctgggagcagggagttgccaaagaccaggctgacctgggcaggcctctgcccactgtccagtggctcctcagggcttgggcttggggcatagctcaggcccgcatctggagggcccttcagcaggaacgaacgttctccaggaaggcctgggcttctcttgttcttgttattccatcaggacccaatatagtgcccaacacaccttagctaattgtgaagcaggtgttggctgttgccctgaggttaccaggggctgattgggggagggctacactgccccccccccgcccccacatgggccccagtgtccacccaggtggtcagtgcactcagcttatcccgtcccctgcccgtcgttgggctccggttacctgcgtaggccacccttcgcccagatggggctgtgcagtcccaaggagggccggcgcttctcgccaagatggcatgccctgctcgctgtgggcacagccacctgagcccagcctcctgccagcagccacacctacttggggagctgggccagggacctggtctcaggcagcacggtggggggcaggcaaggtgttcaataggaagtcagggcccctggggtgaccaggactccttgactctgacttgaggggacagtgggagtaggattgggtggccacatccctcgagtggtttcccctctccctgcctgtaccagcaggtgggtgatgaggcccactccacacatcaggcccggagcccaggggtgctgggtgcagaccatggggttcaccctctcctgccctggactccaggcaggctggaaaggagtggagcacccagggtccagattcagctggcaaggctggcagctcaggaatatgcctcagggtcagaaactaaggggccaggtgagcaccgggcagctcaggcaagagccctgtccccaggctctagctccagcgcactccctctctttacacactggccgtgtacaatctcgtcctccttcaaggtcgcagccaccacccaatgtctcccagaggacagcctcccaccaagagctgagcccccagctctggcctcctttctgtaactagtctctggacacagccactctgtgttccacagcatctcaaactcagcactttctcgccctcaaaacaggccttctcccctgtgtcccctctcatagttgaggccaccagcacccacctaaggtagttagcatccttcctccagaatgcttgactcgccctccctgcatccccgcgtggcagagtcctgctggccctgcatcctgcattgagcatgagtgcacccctccctccttgccgcctctgcccttcccgccctggtagaggccctccatctgtcacccagtggtcacaaggtaagaccagtgtcttaattcatccccttgtctgcagcatcacacacacaccccaccctccacaccaacctgtccctgtcacccccttgcataaaccttcctaatgtctctccatcaccagcagacttgtgcccagcgtcattacatcaaacaagcctagtcgcagcccagccctcacctgctgccttgccgctgatgctctgaccacacagggctctcggagtcccagaagactccactgctcctcatccctgtgcctttgtgtgtgccttctcagccctctcctcggcttggcttcacctgttgacgggtgccctgggtggtccttgagacctggcccagcactttttcctctgtgcatctttagagcagaggctgggcccgagatcctgctggaggtccgtaaaccagagaaacttccctgacctgaagatgtgggctgcacggtggagactgaactgggagcctggagactctggggctctgggtggcaatggcctctcgtaggaagatcccacagggctcatttatccattaccatggggagtgcgttttctgtagtcagggcttttgcttctcacgttattcagccgggctgtgtaatgggaaagaacagtcaccatctgcatggcatcttcctcgccagccagtgggcagggcaggtggctgcttaaggctgcaagctggagaatcgcagacgagggttcagatcttccttgacagttcctcactgtgtggtcttggatgggtcatgtactcctcaagcctctgtttcctcagtgtaaatgggggtggtgatcataacccccccaacacacacacacacagagttgaaatgaagagcaaatcaacacaggaatatgaagtgcctacaaccgtgcccgcaggggaacttgcagcagcttttgtcattgtgtggtacactgagtgcttcccaccggactgctgggcatgggaaagcaatcttactatcaggaacgatgcagctgtgatgggtgctgccctcaagggggagccaattgatcctttttcaccacctggtgaaagcccccagcagggggctagactgtcctcaggagccctggtgtggacagcacaggatggcctcatgcccacatggggccctattataggtcattaaacctgcccttggcactgtggggtcagcaggactggttgatagtggggactcttatagcagaggagccatggcctggggggcctgtcacccaggggtgacccttcatgccctggtttggtggtctgtgcactcagccgtgcttggctttggcctgagtggggctggccattggggaaggtgcccaagactgtccagagcgtggcatggacatgggtttcagggtgactcatttgtgcacacttgggtagaacaagagaagtggcatcctcgcctcccctctggtgggcagctgcatggggacccctttcccaagccccttgcatatggaggccccctcttctgagcactggatctgcttcccgtgcagactcatgctctagagtcatccactgtgggtccctctcagcacctgaaaagggaaaagaagcctgggtcctgggctgagaactatgaggcagggccctgcagccatctgtgatgtgggagaaggcagtttccccttcctaggagggaagacaccccctgccccccaacagacctggccactgcttgggccccctggctccagcccctcccaccgatgggccacacatagcatgtgctctgaagctgaagctgtggtttaggggaaaccaatgttatgggaacagctcccagctctagcttgtgtcactccagcctggaggcagattcagggtgggtggtttggtttgggaatcttattttgcccagaaaggaaggggggagccagccactaaggagagtgctgaatggctgatggctggaggacagactgtctacaggagtcagatgcaggctgagaaggcttcacgttagtgcctagatcaccccccgtctctgcctgtgcctggaaaatggcatccctgacccagggtggggaattggggtgcagtgttgtctatggcttgtgcttgtgctgaggagttaacctccagcagagaggctgtgaggctcccccagttccccggtcccctgagccaccagaagccataggattgtggcatgattgttgtcattcattgggaataaatgcaccctccgccttttggctgacgtggggagggcttgctcctgcccaaagtgctcttcctggttgggtcccacagagagatcacctggaggtgcctcccacctggtgttccctgcctggctgggccctgcagcctcttctcaaatgtggccctactgtctccctccccaccaagcccagctcccctcccctgctgcccttccctcagccactatctctggtcagccctaccccatgccagcttcctcccactgcacctggctctgtcccttgctgtgaactgtcttttacaaagtgccatccagaaggaaagaaatgctcaaaggacattgacttcatggccccagacctggcaacctgatgcccagaggtataaaaatatgcctctgtgactgtggttagatcgtgcacaccccctcatttataaacccactttaggccgggcgtggtggctcacacctgtaatcccagcactttgggaggccgaggcaggcagatcacgaggtcaggagattgagaccatcctggctaacacggtgaaaccctgtctctactaaaaatacaaaaaattagccgggagtggtggtgggcgcctgtggtcccagctactcgggaggctgaggcaggagaatggcatgaacccgggaggcggagcttgcagtgagctgagatcacgccactgcactccggcctgggcgacagagtgagactccgtctcaaaataaaataaaataaaattttaaaatccactttacaggtggggaccccacaaccctggggacagcagacccttcgtaggccttcctacagatttattccataagggaccgatgactgaagccatagctacagctcctccgtgtaggcccagctgggggtggagtgagcctccgtccagccatagctggggctgtgggtcccatttccctctgggtcccctccgttttcctgtgctgtggtttcctccttttagctgtcatgtcccaaccttgatccccctggggcatctggtccacccctgcccatgaggcctatgtccatcccacaacttataatgctaacaagccgtttggggcctcccggtggtcagcaggcctgagccaggggtgacagcagggccctcagccacctggtcccttggcacggtctgtcagggcttcttgcctaatcaagggatgcgttttaatttatgcaaatgggggagggatggtggcagggagtcacagacatccatcaccccatttcctagcagcagtcattcatcagtggggccttaaagataatacactttttgtttcaggcaattacttaatcttgacaaactcctgtgttaagcagggctattagcggggtccatcattaatcagcgcagaaccaagtgggtgctttttctgaactgcaatcactcttggggacccggggtgggccctttgccatcctcgccgccctaattacacaagcagcatgctaacaaccagcatcccacacgtgttgcaggggcgccaagccacgggcagaagaggggcccatttttaacgccagtcagaatgttttcggagccaggcagaatgatacatgggggttattagcagccaccaggaacacagctggggaaacagataactcccctcccctgggtccctcccggacttgcctctgacttcgctgggtacctgggcagcacttagatgccgctgcatggcagacccattctgttttaaggggttacatttccttttggaaagaccacgaatgaagtgaaaataccaaggctggccttgtgtttcctggagtttgttggtgctccacctccttaccagggcctgggtcacagagtactgctccctcctccatcacacacctgtgacccttattacaccaatgcctggcccaggctgccctgagggggagtgggcacccaggagaacaggggatgagtcgggcaaagactgggacctgggccttcccccggcctcatttcttcttcctggtccaagaagagctcataccgccctaccctaccccacccatgtctggaatttcagagaaatgggcatgaggtctggctgtgacacagattagccatttgactgacccagggcaagttactgaacgctcctgtgcctcagtttcctcatctctaaagtggagataatagtaacaataccttcatcaattgctatgaggatgaaatgagttaacaaatgcaacatgctcaggaaggctccagtgtgaaggaagccctgtgcactggctgttagaaccactgcggtttccagtctccaaggaagggccagtgcgtggctgactcctagaaactgctctgtctcctactgcggccccgagcagcatggctttctctcctcggtcctaaattaatttagactgaccgtcggtagctactggccacccttgttatcctcgggttctgttttccaatagtgggaggattcactcattcatgtattcattcattcactcactgggcacatactcctcacctcctccatgccactcgctgggctggtcgttgactcagaggaaatggtgtggagggagtatcgtctgcctgcggtggaggggggtggcagaagaaaggtccaggaagcttcctggaggcaggctcgtgtggactggggttgctgagggcaggctgagttggcatgatgaggatgagggggtgtggtggggaggggctttctaggcagggtggagcctaggaggcatggggtctgcaaggctgtcatttgaccctggggctgggagagtctgtggggcaggatctggaggtcctgagtgccaggctggggctcttgactccattctgctggcaatggcaggacctggggaccacctgtcagtcactcagaccctcctcctggtccccctactgaggtgtgactggacccacaaagcagggcctttgcccacaaacgcctcggatgagagtgcacaggccaggctgctcttgggtttgtggaagggcagctctggtttctccggccccgaaacacattgtatttgggagttttcccctagatcttaaaccctgtttatttaaaaagaagtagactctgtctgcttttaattcacatgcttagctcatcaaaatattgttttgcaagaggtttttttttttttttttgatgtcaggaaggctttggcatgttttcctcctccctttcttctacagtcttattctaggaaataagattctgggcaccgctcagggctggagggttgggtcatgagaccacatattctgtgtctcagtttctgaaccaacaaaataggggagcaggctcttcccacggattcatggactggcctccagtcctgctggtggacaccgtatcccagcaaagagaaatactgtttccatgcgccacagtggtcgttggtggggagagtggggagggtggtgggaatggcatgtgctccaaccatcattcagttaactgggtccagaatcacacgggcagggagccaggcgtccgaaagtgtaacacggcttgcccggtgtttctccacggtcctgccgcactgcccctcatgaccccggcatgggctttgctttctgcggaccctcttatttgtcgaagatctcgggagtccacacacccactcccgtgtctgggaacactccaagcttatcaagaacgcagcgggcagcaatccagggcagaacaagggaggtgctgtcgaccagctctgcgcggagaggtcaagggtgtggaagggtggggagagaggcacaggctgacttaatcccttgggcggggcaccggcctcacccacagaatcgcaagtaaccctcctacgattctgggaacgtttgtgagttaaatgaatggaagggagggaggaaaggagggaagaaaaataactgtgttttcatcagtaaatgtaagcgaccaaatagaagtctgtaggaagctaagattcagaggtgaggaaggactgaggtttggggagaattctcatcaccatattttgtgtattgatgggacttttactaagctagactagaattccgaagcagtggaaagtcaataatgataacgagttaggcctgagctgttcagtagggtagccgcgagctgtgtgtggctgagtgcttgcaatgtggctatcctaattgagatgtgctgtgagtgcaagataggtaccaggttttgaagacgtagtaggaataaaagcatgtaacacatctcattaacaatttttttactggttccatgttgaagtgatagtatttttgacgtactggttcaattaaattgtgttattaaaataatcacctgtttctttttagttttttttaaatgtggctcctagaaaatttacaataacatatgtggcccacattgtatttctgttggccagggctgcattggatgagtggacacctagggaagattctagtccaaggtagagagaattgtaaaggatccctttgagtaacataattattgggactgacaagaggctcccagaaagtggcccttacgggacctgcttggatgaaagaatggagagcattttgtcattcccctgttgattgcagaaagacagtaagtccagccccagtgctcgtttgcttgtccaggtggctgattccgctgcccggttttaaaggtcattgattgtctgtggcaggccctgcctcagaatgcagcctggaataaagaggtgccttggctcagcctgggaaaccatcaccagggcctggtggagaccaaatgtggtggccttactgtcgtctcaagagctatggcagagtgcaaagctgggacttgatgctctcggcaggacgcaaggcaggacctataagccagatcaagaaacctcttgttgggctctgcagggaaggggctggatgctagttaagtacacagaatggcaagtgacaccttcacgacccgtggggaccagacagaggaatggcatggtcatcctcctgaaagggagaatcacctgcgacaagtgggcttcttgccggggaccagtcagcattgcaatagctagccgacaaggtccctgccagctgacggggtcgccagtgtatactgtcaaatgagtatgtcaaggggcagcaagattttaggggaaagcctgaatccatcccaggccacctggcctagccctggcctgtgacaggtggaaggagcactagggcctgggcaccgtctcctccagctcctgggctggattcctgctttctgcattggattctgcaaggtgccagggtccctgggagccatggtcctctgggcttcaaatctattgcattttgcagtggggaggctgcacactacttttttagaaaccttctgtgaccaagacagagttttcaaccttaagcaagcttgaccagccctattgtttcttccagccctaaaattctctaatgtgggactctacatgtctacccagacagacaggcagcccctcccattccttgtgatggcggggatctcccaggtgtccctctggagctcaccccagtctcccaccccttgctaaaggggcaggagcccagcagaggggtctgtagggatggccacaccggcacccttcggggccctactgcgtgcctggccctgcactagctcttctccacttcacagtctccctctgacatgggtcctgtccctatcctcattttacagataaggacaccgaggcacaggaaggttcggtgagtcagcaatcaagccagacttggctgtggcactggcggcagcctcagctctgtccaacaggacactatgccgcctcttgtggcctgtctcctgtcacttcaaggccactgttgcagggaacagatcccatgactgcctggctcccgagcggccagacccaaatggcacggggctggcctctcccgtggcgttggctggagcacactcctcaccctggaatgtgcaggtccctctgcatccctacctgccctcaccaggagaccagtctcagaactctgtgcctggtgtggagtggctgtgctggccccagcccagcacactctctctttcggcagctaatttgtcaagtaacacctcagcctggggtgggcagtgtgcgtgggcggacccagcagaggccacgggtcctgctaggctgtgtctgcagggcaggcctgattgcgtgagtggcctgggcctcagccagccggacaccagccagctcgtggtgttggaatttcctgtctgattttaattcctccccccacgtttttcccccaagtgagacagaagcactttttagttgcacgttgtggagtggccattcaggatattattcttattaaatgcttcctgtggggtggtggctgggcatcaggagggcctctggaattctcctgtcctgtggcttattattgaaaatcatggtgccatttgcataaggccctggggaaggaggttttccatgattcgtgctcttttggtgcttcctacctctgatgcttaggccagtgacttcgtcctcatttgcgaacgaacacctggtcacctgggctcacgtggctgaagggctggcctttgaaagtgtcaggatctcagaacagaccaaggctccctagcaaggggagaaagtccctggcagcctctcccagccctggtgtgcactttcattcatgtaccatcgaaaagcacagacccctggatgccttccaaacctgcattcccagtggcacccagaccccttgcagctgctgctcagaagcactggtaaatggtcaccaggattcaaatgtctcccccactcccgcctctctgatcttctgtgttgagtttctccagttagtacaatgcctagtaggcgcatggacatgataaatgatttccccttccttactgtgcaactgggaactatggagccacagcaagtgtggaaatgccaaagggcctgtgagtctccctcccggggtggtccctggagcagcagcatctgcatcactgggaacctgttagacatgcccaggctcactgaggcaggagctctggcaacagggcccagcaacagcctgagaaaccccgatatcagggcttagtgggtgcttcatcatgtacctcttactatgtgtattacatcatgtgttcctctcgaggacgccagcaagagatgttcctcatcctgtatgtataggagaggccacatgctttgcaccggggcttacacttcactcggttcagtgccagggcacaattgggcatcctgggctcactgtccgcactgccctgagcctgaagagcctgccatcctcccccttccttctggctctgccaggtctggcctcttccaatgagccttcctggctgctccagacctcatggaaatcttttcctgactttgaggccacttgggcagtttgtgctgcgtgggcctcgctgaatcccgcagggtcaggctctccagctgtggcagtggcttacacagcagcgccccggggcactccctgtgggcaggaattatgcctcttgttctctgtggcctccagagcccatgagcagcgtcctcttacattgagcgagtaggggaagccttgacctgcagcagggtgtgtggttgtgacttccaactgtggatggagaactctgccctgggtggtgagcagctccgccgtggattccagagacagctgtggagccaggcttgatggggcccaaagcctgtgtatgtcaaggccatattagtgggacaatgtgtctgaactacatcgtatccctagatcagacctggatggttgaaggagggagcatccagcctcttctttgaagctggtgtcgtcgtttctggtatcttctgggaagcctttaggtacaacttccctggggattgggcctgggatctccacaggaataggagagagcagagtcttgctccatgggatttgtgacaagcccagaataaatggccagaagcgaccttagccatgcaaacagcaagctgacatccagcatcattggtgttgggagggcgctggccttctggggttcatcaccagaatgacggtgctgatcgccatccttacccatgaggttaacatttttcatttcataaggtgtcttcacattcctgtttcatataggattaagtggtttaactgatcaaattgtacattaagcgtggaatggaaagtagcaatcactctcactttctttctctctgttgagactggggagtcattgacgaccatgtagccagtggtgcatctgttcttgtttgacaactcagacctggcccagggccccgagatggcacatgtgtgcattcaggccccactctgttctcctgagcctgtgcttcctggcagagcccagaagcagcctgaagatgcagtaccctgcccagccttgccctccttgcagctttgtccaggccatccatgcgccccctttcctggagggaagtagtactgggtttggtgtaaaataattgaattgtagaggagaccccatcctctgcactgctgctgccttgcagcacacaggaggagccttcatgagatgtcataggctgggacctggtcacatcccttctgccttgggcttctcctgctgctgactttcccaagaggggagttattgctgcagccatgggatatgtggctgatgcagacaaggagagtgggagccctccttttaaacggaattcacaatagtgttcacctgaactcccagaccaccttgcaagttccctcccctgcttattttctgcgggcagcatggacacagacactagggaaagaatggtgggaaccaccagagcttgtagtagccagcctaagcctcctggggattggtcatctgggaataggggtgagtggccagcagggattaatttatagaagatctttcctgcaaagccatggctttcatcagttcctgcatcctcactctgtcaagcagtgagtttgcacagagtacacatctgtgcatggagaactctgccctgggtggtgagcagctccgccgtggattccagagacagctgcagagctgggctgggtggagcccaaaccctgtgtatgtcaaggccatatgagtggggtgatgtgtctgaactacatcgtatccctagatcagacctggatggctgaaggagggagcatcggtggatgccttatatgagtttctatctgatacatctcaatgtcccttatactgggaatggaggaaaagttctcttcattaccatagcaccgggacccttgtcacatctgctcagagatggggaagggcattatgacttattaggggtttctactctatggacaccataaatattctttttttttttttttttttggatatggagcctctctctgtctcccaggctggagtgcattggcgcaatctcagctcactgcaacctccagctcccaggttcaagttattctcctgcctcagcctctccagtaactgggattacaggcttgcaccaccacccctggctaatttttgtatttttagtagagatggggtttcgccatgttggccaggatggtgtcaaactcctgacctcaggtgatccacccacctcggcctcccaaagagttgggattacaggcgtgagccactgcgcccagcccaccataaatattcttcacagcagttgggttgatgtcattcctattttacagatgatgaaactgaagcttggaacactcattacttgctagcgaatgacagagccgtggttcacactcaggtctgtctggattcatggctcaggtgcgttctgctcctatcccaagccccttagacaacagggacaggtgatgtcctgtaggactgtcctctggctgatgtgtgacactagagcaagctggacttcactctgactgcaaaggttaccttgacttccagcctgcccctctactgcttttttctttcttctacactagcgccttcttttgccaaagatatcggtgtattttgtgcctaggtccttccattaggagaaaagcaaccagtaagccatctacactttggtgtgaatccattcccatgactcccaagttctgtttgcttctaagaaaataatactgtgctggatgttacttaatatgcaaggaattctaagttaaaggaacatgataaattagtttttaactggagaatcccaaagtcccccatagtgggaacaaaattggatgtcaaaaagcccttctccagtcatcccagagacgtgccaagtaagaaggcctccacttcagctgattggagtccactcctcacgtaagagtgcccgacccgacgcagagcaggcaccccaggagtgctttgtgtgcgagtgctggccagggtcccacacagaccaaagcctcctggcctgaaggctgggaaggtgcatgtgggcatcacagaggccacctgagtgtggcaggtggacagggcatggggacctatggtcctgacacggggcccacccggtgggtgcagcatggctgctccaaaggagtctctctccacgtggctccagcactgtcccctgggattcacacctgcagcatgggagccaatccctggaaccctccacagcaacactcagcatcaccgggcttccccatcctggccacagccaaggggctgagggccctggtgtttggaaccaaaggcctcatgcgcccttccttgatttctggtcatggatgcagctaccgcactggcctcctacatggtgaccctggagtgtcggccaattgcccaagaaggatggggatccaggccccagccatgccactgccttccttcccgggcccacaagctgcactgagatgtgtttgcgctgcctcgtcgtaacacagacctgtatggtgcaaggctgggcctcaccttccctccatcagtgctggggcaactcgatttctctctgaaaccggtttcttctctggtccaggccggcctggtgcacagcgaccacatgcttccaagctaattccctcccgcagtcttgatggaagagaccatggtaactggagacggtgctaatctctaggactggacagcccagagggctggggcatccccaacacagccactctgtcctgggaggtggctgctttcacctccctggcctctctgccgtggaacaggccctcaggcttctctgggagcccagccacggggcagtgcctctgcgttgtggcaacacatgacttcatccgaggagaattcctccggctgctgatggaggccgcctggtcatgtttccatgacccagttttcccgattctttgtctgaactctgcagacccctacctccttctctcccccaggaatccacaggatcatttctaatggggcattaacttgagccaggtttccggggaagggctgtccttgccccctcactgccctcctcactaacacaagaagaccattacacccagtacactgcccacaccaatgtctgctcgccctgggaccgccagcaagaaacatttggtgttgaaactgcagcgtagaaaagttccaggattttaaagaaaaagccgtcactccgccgccaccctcagcttctcaggctgttgggctttctgtgtaggatcaaaaacaaatgtgcattttttttttccagaggggagtgatgatccattgaaaattcccatcttagagtttcttcctcagaaacttaaaaagagagtcatttctttgaaatggcatacggggtgtgtatgttttcagggggatggtgtgtctgtccctctgccggaaggacatgattaattttggattttttcttttacttgaaaaaaaaaaaaaaaacacaaaagccaacaatgaaagctgtgtgtgtaagggtctggctcaggatgtcactcaaggcagcgcctattcttcccacgcatcttcatgctcctcgtgggcttctgcagcctctggatgcagcaatttcttgccagagttggaaagcagaatttttccctcctcagcctggccagggggctctgagcaaggcattcacctctgaatgtttccatcgggggctgtgggacaatccgtgctggtctgaaagagaccaccaatgagtcagggtcaacctttatccctcaggttacttgggaagaaaaggtggtctgtagagactgtgtgtgcacgtgtgtgcatgtgtgttggcggggggtgttggggtgctgtcctattatacctgggctcagaggattggggctggggctggggctggtgtgtcaagtgggttagaagggccgttgggtcagtcattatacatacagggccacaaagatgaaccagcatctgcacccagagccctggtctgggcctgctcaggaggtccctcctgaagccttggggtgtcactggctggaataagcgaggccctttgcctgggaagtgggcaaccatttacagatagcaggaatgtgccagtaggaagggacctcatagctcctctaatccctgttgtacaaggagtgtgagacccagagaagggacgtaatttccccaaagtcccatggccacctagcggcagggccagtctgggattcctggcggatgggcaccactgccccacagcactggaccctccttgtacagcatttccaaaagttgtatcagagcaggtgactgcctgctcaggacttcccaggggcttcccagattgctcagaaaaaaatcccaaggttcttcccatggcctggctagtgtgataggaccttctctcctgcctttccacctccatccatccttctgtgcctggcaagttagccttcatgctgaaatcactgagttctcctgacacctggcctttgaatttgctattccttctgccccaagctccttctccaaagaggctgacttacctccgtgcctcatccatgtctcctctgttccctctcccaggtggatttcctccttagcttcatccccctctgacactatgttataaatatgtttgctgacttgtccaccacctgtctcctctcactgggccatggtgtgggctgccttgtcacaacactgttcccagggcctagaacagtgcctgccacatagcaaatgcttgatacaaggtagatgcatgcatgcataaataaatgagtgaatgaatatttctagatgacagctattcatacttcacaactgctgatgtgaatagatggggtcttctctctgagggtgagcggaagggtctgggcaggtccctggtcttactccttgcaccttggccgactagctggccttatacatccctgtccatcctggggcaaacactgtgctactgtattgggatagcagtgccagaggccctactcactgaaggcctgctgcatgctgggtgctgggctgagctgtgtggggaaaagactatgagaccaccagtcacttaccacccaatggatcattgctcttatggaagtagagtcccaccaccctgagccttgatgttctttcctgaaaaatgggaataagaacaaggttaatggtaaaactaaaggtgctgtcagcaaagccccatgaggcagcagaccttgctggagatgagcccccacaacagcaaccctagtgggcacattgccactctgccctggccaacctcacacatcaccgccaggacaggaggacccactaacacgtgttcccaggctcctcctggggattccagggggtgagagaggagtgcacgggtgcagcctgcacattccacaggtgacccaggctcctggagagcagcagagctggtaagaggtgccacctgcagccctgcctacctggagaaagagaaagtgcttctcctgtgacctccacagcctccaccccaggagctgccagacaacagacggcaggccccactatagcaggactctgtgggaaccctccccaggcctctttctggaagcctcaggcccctcctccaacacacaccacatgtacgtacacacagcaatacacacatatggcacacacacacacatatacacagcaacatacacaccatatgcacatacacacagcaacacacacatatggcacacatacacacatatacacagcaacatacacacaccacctccacatacacacagcaacacttatacacatacagcacacacgtacacatatacacagcaacacacacacacaacagcacacacacatacacagcaacatacatgtacaacacacacatgcacataaacacggcagcagacacataccacacagcatatgcatatacacacagcaacacatgcatacaacatgcatgtacatatacacagcaacacacatgtatatacacacagcaacatgcacatacaacaacacacacatacagcatacatatgcacgtatacgcagtaacacacatgcacatataacatccatgcatatgcacacagcaacacacgcatacagcacacacatacacagcaacacatacatatacaacacacagcatatccacatacagcaacacacacaccacatgcacatacacagcaacgcacatacacatacaacacacatgcgcatatagcgatacacatacatataaagacacacacgtactacaacagagacacacacgacacactacacacatacacgcactgcacatactcacacatgcacgtgcagcacacacatatacataccccacacacgctacatgtagacacataccacacacatatgcaaacacacctcacacacacgtacatacacacacacacacaccatggcttagtcttgtggggcagagaggcagcctcagtggtacctgtacttcatgtttgcctggcaaaccactgaagctcacaatgttccatagactttatagacctgggtgaagttgcctgaatcctgaatcctgagcagagcatgtcagctcatagctgggggtagggtggggtggtctgggctctgatggcattaggagaccccccctcagcctctggaggagcaagaccatgaatggtaggcacaccagggtgctgggggatggcctgtgtgaagaccaaggaatcctggactgaatgcagcttcctggggtcgctgggaagacccaggagctggtatttgccaagtgctgaaagcagagctgtggactgtgtgtgcatttgttaactaaagtacatagcaaggtggggacgtggtgggtcgatgggggtctgggatcaccctggcacttgggagctgcctccgagtgtcatttaggctgggtggagggaaaagccattcagagccttcgattctcctcttggcactgtcgttttttagtcctgtgactttgggcaaggccatgaatcattcttggcttccgtttcctcatctctttaatgggcatagtaacactagttgcatcagggggcttctggatgtgcaaggaaacatttagaaatacacacacacacacacacacacatacacacacaaccatttttattttgttggcaaaatactgaaatctggtctgccctgccatgtttttaaggcccttttctacacatttgggaaagcgaacactgtttccctgctgactccctggggatccagtggtctcttggtctgtgagcaagcagtgcttggccccccaccctccctagggtttgcaaccagtatgagccagttttcctgtgccccacattagtaaattcatagtttgatgatggactttggaggctccaaacatgagtgctacttgtcctcctcagcagtgacacttgttgagtgtgtcctatctgcacagtctccgggcgaagcgcctcctgtgtgtgggctttttacgtcttcaccgcagccatgtaggtagttactgttatccattttcagatgaacaaatggagactcagagaggcaaagaaacttacaaaagtcatgcagcaggtgagtgagctctgaccctcagggttcccagcctccggagcacctggtggtcccgtcacagccaccttagtcacagccacatgcccggctcacctgtgcagggccagggcctcagagaaaaggttgtccttccagcacttggtggctctggaagtgagagctggcccagaggcttggaccacgtgcctgcaaccaactcctctttgagtctgagttggggaaactgattgaatcagggtgagaagatttgctttttgtttttcctggtccccatggaaagtgccagtattgtgaaattatgaagatggagttgaacatgtaaaaattaaagttaaaatttcaggagaaaaatttcttcccattaagaatccattgtgttcaacccaagcatccattgacagatgagtggacaaaaaaaatgtggtctatccaatacaatagattgttattcagccttaaaaaggaaggagattctggcacaggctgtaacatggatgaaccttgaggacattatgcgaagtgaaataagccagtctcaaaaggacaaatactgtctgatctttcctgcatggaatagctagcatgggaaattcatagaggcaggaggtagaatggtgaatgtgcaggggctgggggagagtaatgggagttagtgtttcgtgggtgcagagtttcagttgtggagatggatggtggtgatgattacacaacaatgcaaaggggcttaatgccactcaactgtgcatgtaaaaaaatggtttaaatgggccgggcgtggtggctcacgcctgtaatcccagcactttgggaggccgaggcgggcggatcacaaggtcaggagattgagaccatcctggctaacacggtgaaacctcgtctctactaaaaatacaaaaaaattagccgggcgtggtgtcgggcacctgtggtcccagctactcgggaggctgaggcaggagaatggtgtgaacccaggaggcggagcttgcagtgagccgagatcgctccactgcactccagcctgggtgacagagcgagactccgtctcaaaaaaaaaaaaaaaaaaaaaaaaaaagatttaaatggtaaatttcagatgtctttactgcaagaaaaaaaaaaagaattcatagtatttatggtattgtaccagaatctgtttgcacagaaacagttagtagcattatttttctatatttttttgtttgtctgtttcttttttggttttttgaggtgaagtttcgctctttgcctgtaatcccagcactttgggaggccgaggcagatggaggtcaggagttcgagagcaacctggccaacatgatgaaaccccatctctcctaaaaatttgtctgcatttcttagcctagcagtcagctgacctgtacatacctatcacaaacccatccacatttctttaaaatattcagaaatccaaacttaaccctgcttcccactggcctgtggccttcagactgagggagagttgactaagaaatccccacttcttagcccttttcccagtataactactttgttaaaagccttcttttcctaaagcctataattatgtttgcctccagggtacccaggaattttttcttttaataaacaaagagcatcctacaattatcatgatgatttgtcgagggcaggccaagttcagacaggaggctgactcagctctggaaactgacacgcacgtgctggcgttttcgatcctgggggcacccgacagcgtttaggggtcaagaattaatattaagagctggagaactaacagatccacatagatgtccactttatactgccagcaaaacgggacagcagttgggtgggatttggccttcctgaggctggcggcaccgtctgtgggccgtgccatcacaaatggctctaggtcaacacctccagcctgcgtgcactgcagcatccggatgccgtaacctggtgctgctggagccacacgcagccagggccggcatgggcagaagccggcggagttggagcctgtcgctctgtcagccctgatttgcgggctgagcccagttttgtggccctggctgtaatctccccgagttcaaagagtgcttagctgcttgtctttgtcaagagcgcagttggggatcttttatgtgaaagatgtagaattctcgggcagactttgattatttattcatcccccttcgtgggtgtgtgatcgcgcgggcactgcggagccccttgtcctggctgctcttgctatgaaattcattgagctttaaagccctttgaaagtagctttttgagggagggggaaagtttttgaagtcttgtttctctctccccctctgcagtgccgcagcatctcttgccaccattccatgcgcccctaccgattgacatgcgacaccaggaaggaaggtaccattacgagcctcattctgtccacggtgtgcacgggtaagtcctgccctctgcctgctgctcctggcgtgcagtcacctgccatggggaggctgggccggcagcctcagccacatctcctgcctctgtctttcttttgggggttcctgatctacattgtcctgagcgggcgatcacctttgctatcatggcctgggaccctgtgtgagcatgtgcgtgggcagtgtataaacaccaaccacccccgagcccacatcaccacttataaggctctgggcttccttggtgtatctatacatggtttggagctctttcttcatccatgaagtgggaatcctctctaggtctaagatcccatataagtaaggtgatcttaggtatctgttgttccagcataataattcagagcaccctttttcacttcttcaagtgtccccctttgaatagtaaattgtatagtcaccatacttaaaaggacaagctcaaagtgatgctttggggcccttcctattcccagctttgaagtccccaggtagaaggtgtggggtcaccctgtggtctccacctgcctaaccctgtccctgtcatacccacctggggcctctaagcccattggctggtgtcatttcttggcctttagggctcaaaagtcttggtctctggctatcccatccatcctccttccaggaaagaaggcccctccttctccctacccccaaactctccactgctccccgcacctgcctccaggagagctcttgcaaaggtcagccagccccaagacccctctcgacccagcatcttcatgcccacaccctccagccccctcacctgttcatgccaaggtgctgtctgtggttctgtcccatgtctctgtgcctggggccagctgcctgcccagtgtgcctggaatctccccccaacaggccacctccaagcctcaaccgaggagtcacctcctcaggggcagtgtgatccttcacactgagcgggggctgctgccctcaatccacagcatcatcatccgtttttgcacctgcctcccagccagctctgagctctcctctcacctctgtgtctcaatgctgacatgaataggtgtacaaccagtgctcgctgagtggagagcctctccccgcctgccgccacctatgaaggcacatcctccttcctctaccatctcccatcccagtgaagtcagtcaacacttgctgggccctcactgtgctcacagcattgtgcctcagcagagtcctgtttccggacacccattgcctccccaagacggagcaaacctgggacttctactttctttttaaaaactgttttacttttaaatattttactctgaaataattaaggtcatacaaaaacagttccaaaaaccataaaggctttcttgtatatgcttcacgcagctcctcaaatgtggacatcttacataacccaagactgacagaatgctcttcactcacccacagagcttatccagatttgctcagttgcccactagtgtctttttttcccggttcaagacccaatcctggatcccacgtggcacttggttgccgagactccttcgtcatctcctgtctgggacggttccttagtctcttttgtctttcatgaccttggcagttttaaagagtactggccagttactatataagatgtctctgggtttgggtttgcctgattgatgctgtttcatgatgacattcggatcatgcgttttggggaataatactataaaagtgatgtttgtcctttgcaggcatcctgtcaggaggcctatgatcttcacgcttctcactgctggaaatgttgatcatttggttatgggcctgtctgctggcttctccgctttaaagttgtcccgttcgtaattaataagtattttgtggggtaatacttagaggatatggaaatatcctgtttcttatcatattttcatccgttaacttatacatccatcgatgcttcttgccagaaacagtcgttactagtgtttgccaaatggcgattttctgtttctatcattttgtccacatttagtggttggaattctcctgtaaggaaaagctgtcccgcctcccacatttctttgtatatttggttgtctgttgttatgcacatggatgcatggttttttgtgtgattctatgggttatactctattactaccaatatttattgtgttcttccagttgtcccagatttggccgttggggtcccttccagttgtcctctgtgtcccgttgacatgttgggaactttttgttttatttcggtgtgcatacctggttctcacttgactaggatccgctgccgcagccttatgtctgcctggtgggtgttggagtcatttccaccctctgctcacctccagggcccctccacctgcaggtggctgagaccacagctggagaaacctctggaaggtgcatgtgtttggaactagttgggccacccaaaaattgcccagtcagtggcgtctgagactcctaggagcatccagggagctcagtccctatttgggagggggttgctgttgctgatttcttgctcatgagtcatgtttggctggttccatgacacggatcctgggcatagcaggcctgcctcaaagtgctccctgcacgggatgttggtcaggagacctgggcaatgctgagagctttgtgcagagacagtccatgctggagtgcttctgcctgcaggtgaatgtcctggttcacctctccctatacacctgaagtgtgtagaggcaccaccagaagtgtaggaagaccccaacagcgatgactgccttcctcatcataactgaccttgtgaaccggccctgctgtaaatgcttttatgtgttcatgccgtttaatcttctcaacaacccaaaaaagagtcattttgtgtttttccattttacaaatgaaggaactgaagcagcacagagtgggtagatgactaaccctatggctcacccactttgcaagttagaaatcaagttccagccccctgagctcaggccctccgctgcatgctggcctttcttgtgggagcgtaagtatggaccatgggtccctctgacgagtccagccgagcccttcttgacagcacctcggcccttcgttagggcactgccccgagtccagtcgctcccagaacccctggccaagcagcagcagtgtcccctgggagtctgttgtgggtactgcagatcctcaggccacagcccagccccattgagtcagagactccacggaaggggtctgtgtctatgtgtgccacgccttgcaggtaatgcagttgcaggctccagcttgacagccctggctacaggcagagcccccactgagaagggaggccctcagtgccgtccttccctgtgtaggtgggagccctgggctgggaaggggcctgggtcttcaccaggctttgccatgctccagctctgggtagggcctgcttccttcccttgccagtgagggtggggtgtgcgcagagcacttggagaagggggccgtggatgctggcatgcagcagggaggagtggcccagccagaggcccacagaaatggccttgtccctcatggcctacacagctccttcactggttggattcctgaagagattcctaatgctgctgtaactaattaccacaaacttcatggcttaaaacaatgtagacttatcctcatatcattccggaggtcagaagtctgaaataagtcttatggtacttaaaatcaaggagttggcagggctggttccttctggaggctccaggagagactctttgacatttctaggttctggaggttgcctgcattccttggcttacagccccgtcctcacacacatcaccttttcccccttgctctgtcctcaccttgccctcttcctagtctgtgggagttttctcccctgcttctctcttctaaggacacctgctattgcctttcgggcctactgggataatccacttgtggctcccatttcaagatctttaaagtagtcatgtctcttaagtcccgtttgctgtagaaggaaacacttaacaaatgccagggattagggtgtggatgttcttgggggctgttattcaggttatttgggatcactgagccccagtgtggagtctggcatcagcctgtagaatacagtaaatcatatttataatttgcatgggtctgcagcaggccaggcacggccctgggccctggtatattgtactggtgaatcttcctgactgctctgtgagatgggggttaagcttcatcttgcagatgcagacattgaggctcagagaggcacagtgacttctgtgtgacatccctgcaaggtagttacttccgtgagggcaaggagaccaggctctggggtgcagatctcctccccagccaaggaggggctagtctggttaagccccagtgatgggcagcagcatggtgctcccagagccccccgtccctacgcggtcctgctggggtgggcttccagcggctccacactatcctcaagacagttggttcccgccagactgagtgggggacacagcaagagcctcggggctggccctgggctctggaaagcccatgccctcacctcttccgcccccagtgtcccaggtgagaaccagggcaaagcttgtgaggaaaatggccccgtggctctggcttccatgatgaatgtggttggagcccggtggagaatcccgatccatcaagcccatgttgtagctcgcttctccctgccagcaccaaatgtgtctaattacacagatgtttgcacagcaaatgaggtacggtgtcatctcatttctgtgtcagctgagcctgagcctgagcctgctgccctgagctggtgaccatttcgtgggtgtgcccgcccctcagcccttgcacctcctgctttccactgctcaagcacccagaccccctccccgttccctctcaggatcctgatagctccagggagggcgcacccagtgtgtgcaggctccagagaggtgttccctgcactctctcattctgccctgccctctgcccctccggagtaccttggtcatcacccaagagcctgccattgtcagttctcagcctgccaggctacccgcactgggacccattgccgaaccctccctagctgtgattaacatgaattaactcacctcagctttctcatctatagaagggccagatctgctgagacaacccacataacccagccaactgagttattttgagaaggagacagggtaatgtgagtaaagcgtctagaacactttggaaacattcaatggatatgagcaacaatcgtgatcattgttgttatcctcacttgctgatttgagaagggggccacggcaggctgggagactgggtggcagaggccggccacagcatgtccttgggagagttgactgtctggggactgtggcacagaaggtgggggatggggctgaaggagtgctgtggtgcggtgtggtgggggtctttctttcccccagttgaggaatttggacttcctccttttggcaaccaggagcagcggggagtggtcagatttattttcaggcagctacagcagtagttagggagtagacaggagaagggcgggaactgtggtgagaggacctgccagagctgccacagtggccctggggagaggggagcaggaccagggctgaccacccggctgtaaacaggcagctgcacgtggggaaggcagggcatggaggttggtgtgaggacagccttgcagcccagcccagctcgatggcctcctcatagacacccaagcccactcctctgcagagcacccttcccggtcacttaaggttcaaatgcacagcaggcttgcatggcttactgatgctcacgtggttccaggggaggaaagtcaccacccacccgtggactcctgctgcagtgtctttgggctgtgcaaaccacaagtgatggggagacaaatggggcaggggtgtgtgattgctggtcaagcaaggttctcttgaagcccccatggggacatccctaagtctccaagagtctgtacaagggcgagaagagaaggccggctgtgaatagggccacacacccccagcagtctctccaaccttgtgacgctaacaggaaagagaagctctttggatgccctctgggccccctgcctcccagaaataggcttgccagggtgtcatggggagcaaggctgaggtgtggcgaggaagggtccctaagttggtgctccccatttcctcagtgtatgtggtcacacaagcatgagtccggcctgccctgggccagcgttaacttgtgtcctggagaggaatgtagaagtccatgctcctggttcggggggctggggtggaccttcagctccctatgttgcttttgaggacctttccagccctgccctgccctgccctgccctgccctgccctgccctgccctggggcttcagagaagaccaatttcagctgcttcctgcccagaagggcgtacagaaactgccccatgcagaggttcccaaacctggctgcagatctgaacacacagggtgggtcttaaagatgcccattctcaggccctggccccaggagttcttgttgattttcagactagggtgaagcccggaaatctgcttatttacaggcgcccataggccagagtttggggaccactgcaggcgccgctgcttgcttgacgtccgggaaagcagccccagagctgcttgttggctttctggactcatcactgacagcgcctcgccgccaaaacacgggttgttaaaaatcccctggttcctcgtgataacccattcacagacaagtccctcctaaacctattcatatgacctaaacctattcatattctcagcttgcaaaaggcagtgagtgtatggggtgggaacagctgcagtatctcagccttcctttctcctcctgcctggcaccatctgacctctgacatccacgactccacccccgacctgaccactgctgatggcttcctgcagatctcttgatcctgagctgtagttggtttgcattgcattggcagtcacggcccaaggccacccttcctggaggagtgacgagggggctcttgctggcacagatggctcagggttgtagctatcaacccaggcccaggtatgttagggcaatagagtgaacgccagctggtgggcatgggggcctcacctccctttcatctgcatgcttggtcacgcaaaatgcatattacccagggcctccggagacagcattaagagtgtctgaagccccacttggtccccgagactgcatgttaatggggatgtttagccgggtgtcggtgtgccttcacttaagagagtagtttctttgctgccactgggccgaactcatgaactttccagtctggggggatttgaagattgctttttccaaggtcagtgtcccataaagactgcaccgttcgccatgagattaatgaacacagcagcctgctcagcctgtgactcaccagtgtcatcccgggcctttatgactctgtcctcagtcattcactgagacgggtgggttgagcagaaagatattttcttcttgattcttggcacagcacccgaggttcacgattcatagaggattggctttgtttgttttttgggaagaaccttctcctccctctgcaaacatgctcgtttcttttcagagcctagaggaaggaggagacttccgaaaggcatgtccacctgccccctgggatgagatgctgggtgggcccagcgtcacccaccaggcaacttgtccctcctttccacgtgggtccacactgcctctccatctccagggagctcttccttaaaaccggctgttgctgaccacttcttcagagcaactggacagcaggtagacagggagcccagaaaccctgggtccaggcgatgtgtcgggcagcacatccttccacggctgtctgagggtagaccgactagatgtggagccttggctcactgtgatgtaaacggccctgagaccccatcaggcaggcccctccccatctctgggctgtgggatacttgggtcagaccagcagaggagcagtagcaggagtctgtgcccagccgccggcttatgtcatgtcaccctccctgcaaggtgggattatcactccccaataatcactcccacttgataattggggaaaccgaggcatggggaggctgactgcctttccagtgacacactcctagtaagcagcatagattacttactgggcattttgaccccccaccccttgctaaaatcttccccagctctgagagcttcagattccaaagccaagaatgcactcgctgggctgcgtgggacagacagctcatttataatggaatctggcctgtaaaagtttaacgaggagcgtgtctgataagacgggctggtctttgatctttactgaacgccaaagccctcgcacaagaggagctgctggctctgggttttggagagagccgtggtggtcagccgagagcaggaggggccagggagtggagcaaatcttgatgtgcaggccgaggtgggcgtgcagtgggggaggggctgcggcaggatcgggatgaactattcggttcctctcctgtccctcggggtccccactgtcggacatttcccctccacacccccagtatgtagacagaacagggttgaggccggggctcacatcttgcctatgctgcttatactcttcacatccttgggcttgcttagccccacaagcctcagtggccccatctctaaaatggggacatagtggctccccatgtgaaactgttgtgaggactagatgggtgtctgtaaagcatgtagaagcacacctgggacataccgagtggcggagagacccctgctctcatcactgccctgctaacattagaaggaaagccaagtttcactgcagacaccctgcagggtgctgggccagtggtgtcctattcagtcctcccaacaccctgtaaggtgggggattttctcctcaattcatagaggcgagaactgggcgttcccagaatttaagaacttcccaagattgcccagcttgtgagatctcaccaagccagagctcttccctatgccgtgattgtcctcagagaggaaagagagtctcgccatggttctcagggctgcagtgtgttgtttctgtctgcagacatggaaacagaacagtaatcaacccaaaggaattaatcactaacagtaaagtttcaggcattggtggggtggattggcctttgaggtggggagtcctcttagactgcacatgttcagactgtccactcggtggaagctgacgccactgccagatgcattcatttattcagccaaactcattgttgctggatttattgtatcccaagtgctgtcacttgaggccactcctgccagcccgagtcaaggtgttgctgagggaaaatgtgagcagtgccctgcccctgaggcactgcttaaaaaggtcagaaattgctgctgccctcaagcctctgtcactgcagccagcactgatggtatgtctggtgcccgtcaaaaagtacgctggacatgtcaggagccccatccctccatcccctccttccaaggactgcacctctgaaatgtacacttggcctgtgctgcccaaacaaagtagcaagagttcagagttgcttaactcagtggggaatgttcttaatgctcgttcctctgaggacactcacccagggaccatgtgtgccagcctcatgccaggcactggggatacgggcccaaggaggcacagtcttttttaatagaatttttatttgtataaatttatggggtgcaagtccaattttgtgacatgcatagattttgtagcggtgaagtcaggacttttagagtatctatcacctgaatagtgtgcattgcacccactaatttctcaaactacatgccccttctacctccaggaggcacagtcttgctgcccacatagaccccatgatctggttggggagagggcagaaattggccaatgacagggtggtatgctggaagagggggtatgggaagcccagagcaccaggaatacaggaacagaaagcgcttatcagcggggacgcatgaaggcctccccccacgtcccagcctttccccaaccccacccactgggggccctaccaccttcttcaggttgccctgttccaatgaggggcctccacttccaggcagacaccagtgccactaaggaggggaatcttttcaaagcacatactcatgaaggcttggtaaaaatcagcagcacacccacctcgaagaagagatatatgtgagctgctcaggattctccagctagttttgacaggcatccaggaaaggaaattccacacaccactttggcaggctgggccagagtttaagaatctcactgtggaggagtttctatccagcccgccggccacccaggccctttctcatcactaaaacccaggcctccagtgaaatataatgaaatctctcccactaacgaaggccgctccccacaaaccccactcccaagactgcacatcttatctcctatttccttattcccgcccatggctttaaacccttgactttctggaagatttggttcagcagtgctcagcccatggcagcttctattacagacaaagtccccctgtactcagaggtcagtggtgcagttcacctggagagggcctaagcaggaccgactcccccagggcctcctccccggacccagacacattcctggttccactgcacagaaggagcaaacccaaggcttccaacaggccccacacctcactcctcccctccctaccctgctccaccaatgtcttcactttgctaggaaaaacgtctccctgataatccccttatcttttatgctttttgggttttctgtttgcaaaaactgataaccttcttattctgctcccaggggaaaactgataaagggtgagtgcatgaatcaacggttgtggaccatgtggctagattgcaaccaagtccatctgtattgcctcctttgtaggcacaattttataacttaatttccctaccaaaacatcagtgtttacttagtaagaaatctgctctttgtcaactgaaaacagtgatttctttattacagctctgcatagggagtgacagctgaaagctggccaggtctggtgtggtgtccgggtctgtgatgggaacggggtgagtgcaggtcgcatatatgggatgcgtgtttgctgcagacagggctagggctggcctggagggagcctggacaacagatagatgttgtggccaagagggcccatggagtgatcatgtagacgactgagcctcagatgctttccagcagtcacacacattcaccaccaccaccagccctgagttccccaccagcgccagccctgtagccatcctgctcctggaatccctatccactcagccaacttaaaccagagactacttctacccagccatccttttaaaaaaacaaattggtcttattgattattgaaaacatgcaaaagaacaacaaaagtggccaggtgtggtggcttacgcctataatcccagcactttgggaggccgaggcagggggatcacctgaggtcggaagttcgagaccagcctggccaacatggcgaaaccccgtctctactaaaaatacaaaaattagccaggcgtggtggtgggcacctgtaatcccagctactggggaggctgaggcagaagaatcacttgaacctaggaggtggaagttgcagtgagctgagatggcgccattgcactccagcctgggcaagagcgaaactccatctcagaaaaaaaaaaagaacaacaaaagcatgtttaagatatctgagtaattatgacatatacacccttatcccctgctcactctaaggactgaggacatgccagcacctttgaggtcccgtgtgctccccaatctcctgcctcaggtcctccccatcccaccattctttgggattcagagtttatcacccctcacatcttatgacggttttaccttgtgtctgactcccctaacaatgtattaattcgttttgctttgtcatgctttatatacatggaatcattgcggaggtattctttgggaacttgctttcacactctacgttcttccgaagattttcctgctaatgtgtagggctcttcattcatttgggctgctctgaagcagtctatgttgactggcatttgggatgtgtctgtttttgctaatttgaacatgactgcagaaacacttttataccatcctctgggccccaagtgcggggttatttaaagtaaatgcatgtctgggaatggaaatgctgagtcacaggggattcatgttctcaccctcctagacattgccagacttcgcccgctggttttgctaacactcactcccaccagcagagtttgagagctggccttgccctgtatccttgtgatatccttgcctcatcactttggaggtgatggcctctacattttaatttttgccaaaatggctcttttctgtgattctaattttctgtttcccttattactaatgaaccttgagtgttctttcacatgcttatgggccactaatgtttccttcttgggaaatgtctgttgggctattttgcccatttttctatgaggtcgtctttttcccattatttgaataagtattttgcacactaaggttactcattatgtggttagcaacatgtgttgtgaatatcctctcccagttcgtgcctggtctcttcactgccttgatggcaggtttgggtgaagagaagttcccattgtaaaatagctcaggtaggttaccgacatttctactatgtttttccctgcatgttctcctcccacccagatgtctggtcagaccttcagcctctggactatagtggttgttccccaatacaacatgtccttattcagctattctcccatctcagaacaccaggcctatactactcaccacctccattccattctcttataagagtctgggcacagttcagatgccacctcctgcaggaagccctctcagattgcaccaacagagtgggtgaattattttcctcccacccctcttcctgctccagcaccttgtatactgttagaaggctatagtcagtgtccattctctctctgtgaccccagaggtcctggcatggtgattcggccaaagcaccagtgtgaactatgggattgagggcctgtgatttcctgagctcgtaactggtcttgggaatgcctgccaagcagcagcaccctgtcttaccatcaccatggcttcatgggcactcagggggtctgctgagatctgtgcacttgtggattcagagtagaccttgggaatgtggggcacagcacttgtcagtcaggtttgcagccacctgccccctcactacctgggtgcatgcggggccctggccgggtctgtctcagaaccccagctccccacacctgctccctcactacctgggtgcatgtggggccctggccaagtcggcctcagacccccagctccccaccatcagtgccatcagaggcccatgctcagtaaacatcagctgatccgggggagtgacgtgtggacgcagacacagatcagcaatgaatgtctgcaaactgcggcctcagctcccgtacacagagcctccccatgaggacagactgccaccagacacacaggagagtgcagattgataaaagacatggactgcgcttcagtttgaggaagggacagttctccattgttttccaaaagaatttgctgtacggctcttaaaaaatgcaaatccccttagtacattttggaaaggacttgatttctagaactttttaaaacaaatgtatgggaaacatggtaagcaagcttgccagtgtacagtttcacctacaaaaccaaacaacaaaactcaaaccaacaaacgaaaaccctggggaggagattgaattccatccagaggagcgttctggagctctgtttctatttgtcggtagagccgagggtggcaggagctggccttgctctccagggaggccctgggagagcagacacatgcacgccctgtcctggcagtaagaagttccagtttggggaggaagagatgcagggcaagctttggggactccagcttcctttccagcaggtcagtgggcccagaggacgcctgcccagcatttctgaggaagtgggcacctggtcctgagcagctccgcaacaggaaaaaggtcccagtgtctccactctggagctccgtggacccacccatggccctgtgatcctggtgggtggtaggcatcttggcccaaaggcagggctggtgtacacaagccagcggttccgaggcaggaggaaatggcatgctggggctgtgtgctgggtggattctggctatggggagtcagtgaccatgaaatccaggcggcgggggggaaagcccgctccacagccctgtgcacatggggatgggaacgcaggactcagacaccttcctccacccagcacaggagttcccctaccctgccagcctgcctcaaagggagcatctactggaacctggttattccgagcaataaataggagccctgctaagagtttagtctcagaagaacgatggcactagtgacggtgatgtctgccacctccctagggccaactctaggccaatgcaacatgctttccatgacgagttcatttcctggggctgctgtaacacggtaccacgaactcagtggcttcaaacaatagaaatatgttctctcggtttcagaggtcagaagtccaaaatcagtatcactggaacaagatcgaggtgtcaccagggctgtgcaccctcagagacccccaggggagactctgtccttgcctttcccagcttctggtgctgccaactttccttggctcctggccatttccctgtagtctctgtctccctgtcgcatggccatctcatcttctgtgtctcagatcttactctgctgtctaaagaccccatgatggcatgtagggcccactcaggtaacccataatctcctcatctccaaatccttgtcttaatcacatctgtcaaatcccttttcccagtaagttcttgttcacaggttccggggatagaacatggacatatctctgggagatctcatgagccccccacgtgccttccctctgctcctcacaacagatttgtaagatcactgtcgtaactgttcagagacggcacatacgtgctcccaggcaggagtgagctgaggtgagccgggacccatgtcttctgcagtagtgtctgtgctcttccctggacacgctccctgctttattcattcattcattcactcattcgttcacgccctcactcattcattcattcattcgttcacgccctcattcattcattcattcattcactcattcgttcacaccctcactcactcattcattcattcgttcacaccctcactcactcattcattcattcgttcacgccctcactcactcattcattcattcattcattcagcacacacgtatttgagcatgctgtatgtccctggcatgtgcggagccaggtgcagggccagcgtatgaacagaaacggatacaggagacaggaggcctgtgagctcacagctgaggatatctggtcatcagctgagatggacgtgctcaggtcagaggaaggagccacctaacacagaagcaccgtaggaggatcctgaccttgacctggggctagggggcaccttgggtgagaggtccctgagctggcacctctgggaggagaacaggagttaactgggggaagggatgaagaggggaagggcatgactggaggtgcagacatcaaagggcaaagctgtgagaggcaagcatggccaaggaccagagagtggcatacaggacacagaggggagaggcaggccctggccacatgggattgtggcccctcgcctgctgccactgaggtcataagtcaccctgagaagcaggcaggtggtgagatttgtaggctcatatccccaagtgactgggcctccttttctcttcatcagcaacagctgttggaccagtctgggggcatccgggtgcctgtgttcccacccgctgctgccgctggcctcactgtggccatgcccctggtgctttgggactcagcagtgctgtctgttaaatgggacatgaaggagctgttcctgcctgtgtctggccccagcgaccagcacagatctcggagcaaagccatctctggcatgccaagggtgggcttctcctctgactccaacccccgagtgggacagcccgccctgatggctggtgctgagtctgggtgagtcagcagccctcagctccacattgttcagcttctccaagcaggcaccgaggctggggtgtgggggccccaatccctgcacttccttccctttctctcacaccttaaggaacatgccggttcttgcccccacaccttggctcaggcggtgctcaggccagatgccctcctttctcctccccagccctcaaagtcttacttgtttctcaggcagaagctacacaccgtccaggtacacatcccccatcattctcactcccagggacagcacccactccgagggtctggcatgctcgcttaggcccagccagctgcatgctgagttacacatggctgtgcagagtgctcattaccttgaccttttatctcccaccaaaaatctcatgtcagcagatggggaagggtcctgggatttgatgccgaaaggtgtggcctgggtctgctgcactctctgagctgctttcgtttgctcatctgctagatgagcggggtgagcactaattgagcacctactaagtgcctggtgctacactgcatgctttccatgcttggctcatcctacctcacagctgccccacctgcgggcaagggatcctgaggctcagggcacatagcactgaggctgcaacagcaccaaagccatgattcagacctagatctgtgacttcagagtccagattctgcttatcagtgggggtggccccctcagcctgcactgccccagagtcaccttggggaccagctgaaattaggcctgccaggggaccaccaagccaaccttctcgagaactgagacagcgagggtggagccagcacgagcctgcatctgggtggaccattagacatgtcagtgcccaatccaacttcacaggggcagagaggctggccttctactcccactcggccacctccagctctgcaaccgtgggcaagtcacatgacttccttgagtctcagtttcctggtctgtaaaatggagctaatgaaatctgccttgcaggcttgctggatgtattgcacgtagtaggcgttctgcaaatgctgacgactttgtcagcagcagcagcatccctgtggcagcagccacagagttaacacagcagccatgcagtgacacctcagtttactttatccattctcccttttcccctcttccttacttccattctttcttacttcccctaaccaccatgctgacccttgggcctggtcctgaaatcccatccaagggctttgccagggatctcccactagggagggagggaaagagggaagaggaaggatcctgctaaggagaggcctttcctggcactgcctgcagcctcctggggcaaggacccaatcacagtcagcaggccagaaccaacatcgggaagaagcataggcatcctccactgcagcggagtcagccgtgaggccgggctcctgctccttgttgctgctgccgctggtcgctaacacgtgcacagcacacacacacacaaacacacacacacgaggaaaaggggctttggttggttgtcctacttgcccagagtcccctgcttgtgcctcatgcccagacacagaaggacatgcccagctgcaccctccagcctcggccactgtgggcaggatgtccagggaccctctcctgttctgcaggtgggtggatggacaggcccgagcacttatggctggggtctgccttgcagggtgccaggcccaggatcattctgggcaatgggaagctgtgtgggtcaacaaatgtcttagctcacataactgagaaggccaaggatactagctttagacagagggactcaagtcaagaaactggctcatcctctctcagctctgatgttctctgtatcatcttccttcttgggctctcccctgcatggcctccagcagccccacgcttgcaccctacgagctcagcaacccttgcggacagagagaaccaaagactctagccaaagctgctgtcttgggcacatgcctatctttgaaccgatcacagtactagcaatatggaatacattgatcacctgggctcaggtcatgtgtcccctgcccagagcagcagaaaggaagtgggttcaatatagacccagcccaaagcactctgtgggctgtgccctgcccctcaggcataaccttctcacacacacacacacacacacacacacacacacacacacacacacacgctttgtgctccagcctttctttgcacacactgcttcctttgttggtaatgcactgcctcgtgaactcctattcatccctcaagacccagccctaatgtcaccttctctgagaagccttcctgcacacttccaggcagagttagagaatcactcctctgctggagcccttatcatactgcctggtaattacctgatttcatgggtctgcctctttccccctgggctctgagctgcctacaggtccctaggcacagccctgttgggagcgtgaagaaatgtaagaaggaacaactggtcagatcaggctcagacgagctctgagctggactgaggggagaaggcaatgcataggggcagtgtcctgagctgagcggcctgcagaagggctggctgtgccactggttgattgtgccatgggagtgtgtgagggtgtgcacatgtgtatctgtgatgtaggagactgtgaccatcttttaaattgagctcatgcagccagctcctcctcccatcctgaagggcgtctctttgagtctctgcctagctgtcggaattcaaggactggatggccgtggctcacaccaaggccgggcccctgcagtacagcagtgtggaaatggaagaagaaagggaggttgctgctggggtcagcctgaagtggtggttcagacttcaccagtagtcgcctttcctggtgaagtctccatggctcaatcgtctgctcactggcgctggcaacactgaggtatcatgagaccctcagctggggcctgggatgggggcaagtgtccaagaaagaggggcactggaccctgaaggacctgctgtgtggtttggcaatgctggcgtgtttcagggctgctgggaagcgccctcaggccccacatgcctgtgtgatgctggcagttctgccagctctggcccattcctctggctgtgtttagtctgtcaaaatgaccatctctgggaacatgtgtgcccctggatccttagcggtcatcacaacatagtggggttggggggttccagctccctacccagagtagggtgggattgtatgtgatgacctggtaggggtggggtggggaccagagacagagaagaagctgaaacggtggggagaaagctctcctgccctcaggtactgccccctcccttatcctgtccacaccctgagccctgcttaccaccaaccagtgtcatcaagaacgcccacttccctgccagggcacaggcaggggctccagcccagccccacctgggttggttgtggttctaccacctgctatctgggcacccttggccaagggacctagcctatctggggatgttcccatccacaagatgggcataaagtgcctgtgttgtgaatgttttatttgaattcacaaagaaaatatgtgcatgtgccccaccgatggctggcacacagtcagccctaccctggggagataccaggtaagagcacggctgtgatctcactggccctgtgcaaaagagacatctcggaaggcttcctggaggaagtgtctagacagtcattgatggctacgatggccagtgggcctgtctctggtattgtgtgccctgggtttccaggccagcagacactctatattccaaattggcttgttgctgaggagagaaggaaagggagttaatgcatataaaccccctaccaggtgcccggccctggtcatttcacaccaccctggtgaggcaccagagaggagcagcattctggctgaggctacacagccaagcgggaaggattaggaagccagtgcccttgaagggacaggcagtgccaggtgcagcatcctgccccaccttgctgcatcccgagagcatttgtatctgcctccgggggatggctctgtggctcacatccccctcttcaggcccggcactgcagccttccctggcacaggggaagagcaagggttgctccgtacccttgagttggacctgttgtggaggctggcctgtctctccactgcccctgatagaatctgttctggggtaggatagtggcatcttccagctttctgtctggtcacaccaagggaacagtcagtcctggacagcagtgctgtgatggggcgggtagtgcctcgatgagggagtcccagcctgggagtgaggcccgctggagggagctcctgcttgcctctcactggccgcacagcatggagaatgactcccctgtctggatgcagtgtgctcgtggtcaagtgcagtggttggttccatttttccataccctcctgaggggcacacagccggtgcttacttcatgggggctgccatgaggatatagtccaggcatccctgcagagacccctggatgtccctacagagcccagggcctgagagaggaaaaggctgccctgggctacccctgggctcctgactcccttggtgatgcttgcggtgggaagggggaggtggagtctaccttccccaaatggtggcaactgcaccgtggaggcggaagtcccagctcctccatgtgtgacccaggccccacctgccatctccaggcccagctgcctccatggcagccccagacagtggtgtgcatgtggctgtgacaacacctcactccgggcctctcaggggaggctcacctggccagtgggacctgggtcaccttggacagactgggcctgctgtgtggcctcaccatgtagcttgaaatccccacgtgatcaatggctatcgcagggggcctcagctgtggttggcacaccccacagggcaaccctggtgccagggaggctggcattcccgggacctgaacaagccacgtagggccaccggcatctgattacaggctactgtgacctcaaaccctggccggcatcctgcaggctctgggaacctgccgtgcctggagtgtctggggaggaccgagaagtcaggacagaaggcaccttagctattctctcagcctgtagacaccctgcattttgctgagccacactcagccttccagaacttgtatccttcagcccaggtctgcccccaggagccatagaggcgtgatgttgtctcagagccttctcttcacaacccacccatcccgtggcaggatgtgagtgtcatcctgctgcagtcacaggctggagcccacaggacctgcccttgtccaggggtgcattagtctggtcccacttctcctctcccgggcacacatagcagcccccgcctaggctaaagctatctgttaagccctccgcatttcatgcagttcccatgcagaggcacccacctctacaggcaggctgtgagtgagaacgtcttgaggttgtgacttgtgacttattccacagtctccctcccattgagctcagtggctggcacacagacatgtggctgtcactgattctgaaggtacctctgagcacctgcatgacgccagttccatgccaagtgctgagcatgcagaagagcctcggacatgccctgctcccaggcagagcctgggaacctggcagatgcacctgtcagcttgagcctggaacagtgcacccttggggagcagagagaagggatcctgagccaagagaaggggcttcagggagggtgccacctgctgggctgacagggatgagaaggagtttgccaccacagtatagggtgcaggaaggcattggaggccaaggattggtgtaggcaaaaaggcagaagcaggttcgtgggatctacatgagcagggcagtcacgtctgctgaagctagacaaccaaactgcggaagactccctccaggcctggcacagcggcctcccaggggggtgtttgtgaaacccagatgtgaggatatctggatgtcacctgtttgggtcctggtttgtactgtactgtaagcccagttttcatgcactattgagcatgatcagtaattatctctggtttgctcagccaacagacaaatcatttcctccctgaaataaccagttccagcagtggcctttcacacgtccagcatcaatccagtgtgaagattgggagggcctcccgggcaatgctaggttagccctcaaagtgtggttctaaccctctaacagcagttctcctttcatgactgcctgccatgtctctggcacagttttggggactttcatcctcacgacaaccctatgaaacagacactattatgatccccattccacagatgaggaaactgaggctcggagaggttacagtgtgatgtggctgggattctaacccaggtttgtctgattctaacacactctcttttctttgcacaatgtcaaattatagactaaagaataaaaatgaaatcttggtaaatgtggttcctggtgacttagctgtggttttgcagctgcttcaccataaagtctgattcatctttaatgagtgagttttggagtagattacctcaaaatacacctgcagctgcatagaggccccaggtcagcaggcctgacataagggcctgaggtcacatcgaatggattccatgactcttggtgggcggacttggggacatgggggtgggccctggccatgccagcccaagccagcggcaccaagcccaatgcacacctgactattggggcatcggagaagggtggttctgttagcgctaggaggaattccatggaaggagaacgaggagatattccaagattttagttagggctcatcaatttcaaaacttgccttgaatcctgaccctgcggccgagctggtcacaccagcaaccaaccatccaactgaagccagaaactctccacttgcaggacatctcctgatccctctctttttcacatatcctgttagcagtatgagctctttgcgttttacccgtggtattcgtattttcatattcgttttcatacatgtttctagcatgcaagcctgtgcctagccccgaggaggcactggggaagccacagtgcaactgtgacgtgtgggcggcctgctgtgcgtgtgctccagcaagtccagtcgcgggtgcgaggtccattctccagcgtggaactggtcggcgggtgcacgcaccagcgtggagctttcactctgcattcactgactaatgcttgagagttcagactgtaattcacggatgaccaggggaatgtcggtgtagcaaataataagtgcaggttgttctggaaagtctttccaggagagacaaggactgtccatgttggttttggggtcttggtggggttccctctgtgtcctccttcttagacggctgcccattgtctctgcaggccccctgccctcagcggcagccctgtcatctctgacatctccttgatccggctttccccgcacccggctggccctggggagtcccccttcaacgccccccacccgtacgtgaacccccacatggagcactacctccgttctgtgcacagcagccccacgctctccatgatctctgcagccaggggcctcagccccgctgatggtgagtagggtgtggggatggggaggggcagctagggcactggggcagggcgcagccagcctctctcacactaacactgtcaactcctcagccttggtccccttgaatggtgaccaggctggctggcgttccttcacactacttccaaacaacaagtttttgggttttatgctcattaaagagcctttggtaagcactcttttgcatgcaaaccatatatgatctattgtaataataacagtaagggtctatccaggtaggtcctgtgtagctgagaaccactggttgtaaccaaccaaagcctgcagaagctggtgttaggaaaggggatgttgtgttggagtgtctcatgcagaaggaaggcggagtgggctggctgctgcctgcgtctctgttggatctgccccttgcaggttaacgcaggaggcctccaagtggcagcccaggccctggggctccggggatgaagctgtggcattgtgttcagatgcctgagagagaacattgattggcctggctcagagatcagatggccaccccggtgtgactaatttcagccagaaaagggcagggtcacatggtacaaatatgtctttatatgtataaagcagatctaaagttttacacttctagtccccacccaccccaccaacagacacatgcaaacacatattagtaacccggacatttaggggccagtcccaccatgccgtctccctgggaagtgcacccccatccatagcatggcatggccccgtgccgcctctgagagcgctgttagccactcattgtccccatccttgaaagcagccaagtgcaacttctcagaattcacgaagctaagacttgacctctcaggctagaggacatctgcaacttgaacttcagagccccatgggcagaggctctaggaaatggggtcccagcgagtctcttatcactaccagcattctccccgagaggaatgcatcctcttccaactggtgggtgtgaccacgagttgaagcggaggcctggctctgagaatgtgcaggctgggattgcacgatgaaaaggaggcatccagttttcaaatgtgcagaagggctccctgaatcgttgactcatcttcctggcacggaggtttgcactttgcctggtcctcacaaaagagaaaccaaacaaggcaaatagttgtagccagggggcttgaaaatggctagctggaatgtgacaccattctgaaatggcccctcaagtcagaactcagccctgaactctgcgtgcgtcccctgtgtggccttgaccaagctggggtgccctgaggcctgtgctgcctctatgcccagctgctgtcttgttggacagtgggcccagccctatccacatcactcctgaggtcccagtgctgggattataggtgtgagccaccatgcccagcccatgatgggctgaccaagagtgagaggacacaggtcaggttccagagtctgcctggctcacactaacactgtcaactccccagccttggttccctcggacagtgaccaggctggcgttccttcctactactcctgaacaacgggttgatggtcacacctagtatggcagctgaggggtgccccccaaaacacaggtccatatcctaatccccaaacctgtgggtattccctcatttggaaaagcagtctttgcagatgtcattaagttaggtctcttaagctgaagagatcatcccagattatccacacaggccctaaatccaataacaggtgtccttacaagagacacactgagaaggcagacacattcatgcccgcccagagacacacacagagtcacagaggagaaggcgatgtgaagtcagaggcacagatgggagtaatatggccacaagcaggaagctggcagccaacagaaactggaagaggcgggaaaccatcttccccttgagcctctggagggagtgcggccctgccagcaccttaatttcagatttctggcctccagaactgtgagagaataaagttctgttgttttaacaacagttaacacaaagtttatgctgatctgttacagcatttgccctgggaaactaatacacatggtaacagggcttccagtgaagaggtggaaggaacctggctgctctcccagggccagggccagagggccagtaaagacgtctacgggaggaaggaacagagcaccctcctggagatgctcaggaagcagagacgctgtattccactgattgcagtgtagcccatgaagagctgggtgggctgggcacagtggctcatgcctgtaattggattttcggaggccaggtgggaggatcgcttgagcccaggacttcaagcctgcagtgagctaggatcgcaccactgcacttcagcctgggcaacagagtgagatcctgtctctaaaaaaaaattttaaaaaggagctgggggtggtgagacagagctgcccctggaggagaggccttcgacggatggagtgccatgctatgcatgagttcaagataaacactgaggtagctcctggaacacccacgtacccgcttacagccccacgacatagcagggacctggctaatttgcatggccctgactcccacaggaagtagaccagatacgccaaggcctcatcagcccttgggctactaagtgaccaaggatggcagattaggctcaagagcagctggcaggaggtctgaattcgagtcctgtgtgccctgctcggtatcagccccagagcctgccatgtgaggttaggaagctcatcagcgatccgaggcagtgttggccagaccatgtgtgactggggacaaatgggatctccacggaaggttttaagggaaggtgggtaggcaggaaggagtaggggagggaacttgaggcatggacaggggaggcagaggctgtgggcgatcagcctggctggaggcccggactcttgggagatgcagcaggagatggcaagaaggaggcagaggaggacggcagcttccatggcctggtctcctctctctgccaagtgcataagagagctcttttggaatttgtcgagactgctaacagagaggccgtagtgcacagtggctaggagcttgcttcctagattcagactgccctctttgcacacctgtggactcttgatgggggtgctaggtttccaagctcccatttgtttcctgacaccaccctgctgagggccagcctccctcagatgctctgaatttcatcctcgctgcctctttcctaagacctgggcagggctgacctcagggttgaagcagacagccccgaggctctgcgctgcagggataaggatgtgtgcaggccaggagctttacctggccaggcctggcgccctggcagcgatctcaccctgaatgttcaggcacagactaacctggcccagccgcgtgccgccgaagtgcctctgtttgcaccttcttttaactttgaagactctgctggactatggatcctgttggcctggggctccgggattctgaggggcatggaggcagagtagggagagattgtttatgagtctaatgaagtggtggagtacagaggtcggggtctggcctccttcagcagcaacaccgcagctcgtgctggccaagcccaggcccagcacagtgcaaacagtggggcagtgggggaaaatgccgaggagagaaaccccgacaccaggtgtgcatttctctctgctttttttttttttttttttttttttttggcaggagaaggcacagccagtgccaggttctgacggcttctttctctcccctctgcccacagtggcccaggagcaccttaaggagaggggactgtttggccttcctgctccaggcaccaccccctcagactattaccaccagatgaccctcgtggcaggccaccccgcgccctacggggacctgctgatgcagagcgggggcgctgccagcgcaccccatctccacgactacctcaaccccgtggacggtgagtgctggccccgaggggctaaggatggggccagcagatctcctcttgaggctgagaaggtcactcgctgtttcttttggggacaaggacccttaaggagaggtcgggctgtaccccaatgccttccaggatggctgtccacaggcactgaatctttggacaacacttactgagtcaccacaggccaggaggcattgtaagcatcgcagacaccacagcaaacaaagctggaacttacagtgcaatggggagaaacagatgccaagtagctctaggaattacgtatgaaagtagccaattataaatggaccagggaaacaaagcaggggcggggggagcgagcactgggtgagtggggtgcagtttggaatggggaagtcagaggaagcctcactgggaagttgaaatctggggggcgagtgctccaggcagaggaaactgcagtgcaaagggcctgaggcagcagtgggcctgccaagctcaagaaatagccaggagccagtgctggcagtgaggggtgggagtgggggtgaggccagagtttccaggtggggtcttgccagccagtgcacctcagaagagactggctttcactggagatgaggctgggcagaggagaaaagagagctgactgactcacagaaggaatctccttccgtgctgatgtgagaattgatttgggggcaagacggaggcaggaggtccagttggtagaggtggggagaaggggccaggtcttgggaagaccttgaaggtagaaccacaggatgtgctcccagctggaatatagagttgaaagaaagaagggagttgaagttgacctcagggtctcgggcctgagcatttgaaggatggagtagtaactgagctgggaggctataggtggggccctcatggaagggagggaagtcaggtatcctgggtagatgaagcttttggtgcctgttagacacgaagtccttcccaccctccaaatgccatcctcacagctgctttcacagggacacctgtgaccctctgaccatgagcctgcggtcagcaaggagcccgtctcaaggaatagtggagggagtggaaggctcagcaccccctcccatcccccagtcagcgccactccgcctgcaggtcctggagccctggccagcggcacacagggaggcagggcagccagtaaagctggaagccaccacagggaacaggcaggcacctcctgcagagccagcctcccggagccctgcctggggtggcgttttcactccctgatagcccacggcagggagacaggagcctgcagggagaccgtcctgcaggggcagccctggtgcctgcagggccgtgcagcctgtagcaggttggggtgggctggtgggaaatcatgtgggaccaggcggggccatgagactcagggtgggctgctgccttgctcaccccgacccgcccccagggctctgttccaggggagcccttcacttccctaaggcctggctgacatctcgcctcctccaggaagtctctctggaagcctcctccttccctttcccctgcccccctcagtcactgggacagctccctcctctggctgctccttcactctttgcctggcccacctcatacttacagcaaccacctcacattgctcctcagctatcttgaacatctcctgcttcccaggaaaagttttgctgagaagagggcggccgacctccgaggctggcccctcatggatatggtcctcgccaggccctggtgggaggccataacatgcctcagtgatgccaccagaatttggtccctgtgtctgtcccgttcttccttgcctttcccagcatggtgtttagtccagaattaagcacaccatccagatgttcaacaacacctgtcagctctgtaggacattgacgtccctctgagtacacacacatccatgtgctctgttcccctctcctctcagcagccctacacggtgctcccacaagccacagtgaggtgtcagagatactgagagaaagttgtgtgctagacacgctccttgccaatattagaaaccaaacagcagcaaccgagtgcatgaaggatcatgtgcaaattgccacacccgaatgtcagcttcctgcaagcaggacccttcttccaagggcctgagggtggcaccaggccaataggaaagtggacgaggcagagaaaccacggccaagagaggtgagatgaggcaggtgtccccacagggcaggaaaggctaagccaggcagccgggagtcatccagtgattttcagcatgagcgtctgtgtgtgcacgtgtgtgtacgtgcacacgtgagagacagtgaattggaatgcagactgcctctgttctgtgcttttaaacacattcttccatgtaattcccttagccaccttctgaggctagaaatatgctccttactttaagatgagcaaatgggctcccagcatctagcggcttgacccaggccttgctctgtttgttaccagcaccatctgcccttccctgggctgcagttttcagcagcacatgcacctgaccaaccatgagccctggcccaagggagggccagccgggccaggtggacttgagctcagcccagagcagctgggccggagccagaggggagaagtagtacagcgagctccagggcaggcctgggtcaggcctggctgcacggtgtcctccctgtggtagctgggctcagaggtggtgacaggactgaaggggtgtggagtggcaatcccaagccctgcgagctgtgtggattaaacacattgactgagatggcacatgtgagcctggcccagtgcctggcatctagcaggtgctggaataatgctggtgcaggtctctttccaccagtatatctttccctctttaaatccactcactcttgcaggattctgtatcttcattgtaggcagctctgtccacctgctgcctaagcccaggccccaggttctcccagaccttttccttgccatctcccatccatcccatcctgtccctcaggcctccaagagtggcgtgtcacccctcccgggccagacagtgacatatcgccctcgtagcactgctccatggctgctgctcatccagcatccccatctttatcctctccgccatcctgcgctcagcccctgccacttctagccccctcaggataaaatccagactttagaacccccgtccagaggccttcctctccagctcatctctctccactgcacactggtcttgccatgcactgccccacatgcaggtccccagatacctccctgagctcattcctgcacagagtcctgtgcacggtgcgctaggccttctcctgagaccccacaagaatccagccccaggcctttcaagccaccaactagctccactgcactagcgggacccaaggcgcccccaactggaactggctgggacttctccttacgtatggccgatggcccgccctgtcaggtctgggagcacatctggcaaggagcaggtcctctgtgtttgttgggtgagtgagtgaatgagtgaatggcacttagaaaagaccctggaatggaaagatgcgctccagctaaggaaagaagcactggaggaatgtagctgttggctcacaggggactggaaggggctggggagcaactttgccttccgggcactcagcatttggcagccccgggggctgagcatctctgggaagcagcagaggagtgcagaggtgagctcagcagtgggcgcgagagctcccagccctccagcagctgctggttaactcatcacaccccacccgctgtgccttctccacctccgccttgggaacacatctggcttcaggacatggaggtaacggggaagcatcaccagattccagagtccacctgaggagggatatcagtttctccagctccagtatggggtgggggtgggagcatttttcttatccatggatttcaggagcagatgccttctttccctttgttcccagtcagttacaatccaagaaaatcagagtagtccaggattatctcctatttttattgctacttaatacattttttccaaaaccagtttcaactagaaccagaaccttcgcttcaccttttaaaaatgctttccgcacttccacttagctccgaggcctgtgtggacggttactcacgtatgtctctaagagacgctgaacacaacacctgggctctcagccaggcggctcgggctggacctgtctgtggggtgtcccccggcccctcccctcccgtgaaccatgggagctggggaggtgttttcggtgggtgcctgctccatgggtctgtgccagtccctcccggaaagctccagaccacacagcagagaatgtgaatgagcgtttccactaggtttctttttgctcaaatcctcactgagaaaattgtgtgggccatccctggcgccagcagtgcagctcaggagacctgtggaaggggcctggctctctctgaggaatgtgtgttcacaccaggaagcccccatacacatcatcttgagcatgtgagctctgtgcaggcgcagggggcctggagagctcatggacagccaaggagaacaggccttctctctctgcctttctctgtcgttgtgtctcatgcacacacgctggttgattcggcaggtgtttattgggcaccttctatttaccaggctcggttctaggtctagggacgcaacgcatcatgagcagcacacaagccctgccttcctggtgcctgagctccagcgcagccctgtgtgagttcctgggcgggaccaagaatgcctgtcccgacctgacgcccctcataccccagcctcctttctcagcaccttcattcatggtcccagaggagggagcactgtaggggagagaactttccagaggttttgaatgtccagccaaggcatggagagggctctgccaggcaagagggcgagcagggagaggtgggtgggaactccatgtgggtcctcatcctgcagggccttgtccccagtacaccggtttgcaaaccaccagcccagtttttaccttagctgagtgccacctgcacaattgtgtatttagtaatattttttaacagactcaccttttggggttaaataaatggttcttcaaatggaactttgtattttttctgaaatggaaaacctaatccctgtctgaagaggatgttcctgtctctgtctccatcaaacctaaagtaacctcatctgggccatgtgtggccctacatttgggaacacactgcagtggtggaagaaaggccagaagctagagaggcctctacggggctcttgtgggattggaaagccaagccctgcgttcctcccagggcactgaggccagggtgccggcaggacagagggatttcccaggctctgatgaaaacccaccctccctggtctcccagtggtgggtgaaggcccatttcctcttgtttttaaaggggtcctgatttacagcaggaagacaggagcgctgctgtgtgggaaggtgatagagaaccagtcagggaaccgaggtcatcattctgctgagcggctccctggagagcggagaattcactggttgtcacccgggccctaaaatggaattttctcatgttatgctgttgaatattggtgatttaacgacagaacagccaccccctccccctccaccacattgagaagattgagatgtttccgactgaaatgttgtctgtttactgctcatactgcctccaagccatgcattttattgtcatattgacactaatttggctcggatgtcacctccattctgacgcctgttctttatgctgcctgtggatccggggggttttcagaaaccaattacattgatcaaacccagagaggcaggaagagctggtagaggggctgccagaggcccaagtcaggcagggatccctttccgagacaggaaggggaaccgaggcaaaggaagccacactgcaggtccctgcgtgagatggtggagctgctgtgtacaggcacgggctaagcggtgtctatgggccatctggtaaagccacacagactgtcccgccacaccagcttcacaaagccgcttcacaggagcctgcagcacagcctgtttctctgtgttcatcacttagctaggccgtggtcctggcaactctgaacctcgctgctccacggcccaggcacttgctactcccccatcagaggggtgagagggctgtggatggctaggtgtggggggcattaaggtcctcaggtcagatttccttagagcatctcctcggcaagccagaaaatatctgggtgagggagttgggctatgcagggaacacatcttagccagtgaggattcagggtacccgagccccaccaccaggctgcatcctgctggccttgtattttttcctgaaatggaaaacctaatccctgtctgaggaggatgttcctgtctctgtctccatcaaacctaaaataacccagccccgggctgaggatggcatctggcacagagaaggctcctgggaccaggtgccaggatgatgctctttcctcctgcccctcagcccaggctcctgggcacacaggccgtggggggatccccagccccgattccatgcaagtccacccacaggtatagatgatatgttggttgtcagcccatagcatccctggggtgggtgctggtagcccatcttctgcatgagacaaccagtgattggctcaaagctacccagttcagagtgtgcaagcagggttggaacctgggtctgcctgagtccagggcctgttcttgcatctcctgcccttcctactgcctcagggaaaacaatgatctccctcctgagcaccttgggattctctagaataattctgcttagatggcaccttgcaaatcctgcctggtgcctcggagtactgtcttcatctctctcctacacggtgagctccatgaggacagggtcagaggcttccctgcccagagtccccatgatgtccaatcaatgcctggtgtgctctcagcactacacgaggggctgatggatcaatgaataaacatgtgaatgagcaacagaaagcgctagtgggtgaagcaaggtccagaggcaggtggtgtcagcgtccgcccaggtgagggtgggcaggtggccagtcacccgtggccgaccggcattaaaacaggtgcctccacagatgaatactccatgttcccggtcataaatcacaggagaaaccacgggaaatgagtgccaggcttttctttctatttagtaatttatcaagggaagaggtgcattaataaacatatttcccatgagaggcggggataacagagatgaatatcactgtcagatttggcctgtttcctcttgttaggggcacacgagagggtgggaatccaaatattagcggcagattctttttttaaaaatgtgttacgaagatgtgtgtgtttcttactttatatcatgttagatggtttttcccctcacattaccgtatttgccactcagtttgtaagtaataggagcctttcagagaattcactcctgcatctttctttgagtttcctttgaagcgaggattgacaaggagtggactcagtaaataagaacccagaagctgagagggcgccgaatgcaagccgatgagtgaatgtctaatgacagctgtgttgctgagtggcccaatcatctttcctagacttgctgcccttcactccattattgactggaggctcaccctgccccttggaacagtcctcctggcccttgaagaagccacattcattagcaatttcattttggaatgcccgctgggttttaggcactattcttggcattctatgtgtgtcttcacaacagccctgcaaagcaagccacactgccctgattgtacagatggggaaagagaggctcaggaaagctaagtaaatgtgctccaaggaagccacaaagtgacaggcttgacagggacagtggcagaggctgtgtgcctctgcatcttgtgtgtgtgtgtgtgtgcgcgcacgcgcatccacctggggtatgtgtctccacctggggtgtgtgtctccacctggggtgtgtgtgtatgtgtccacctggggtgtttgtgtgtgtgtccacctggggtgtgtgtgtatgtgtccacctgggtgtgtgtgtgtccacctggggtgtgtgtgtgtgtctccacctggggcccccctcccatgcagggggccctccctgtgccttcctgccgtcatactccctgccccctgagacacctctcctcctctgcaccctgggcataggccctgtggcaggtggttttggtgtccctgtaccttgggcaagttacttagtgtcctgttttgtcttctgtaaaatgagcataacagccccttctttatgggacagtcgtgaagattaaattacttaacactttaaagtttgaaggagtcctagcgcatgtgatgatagcattgagtaagtgctgtgtttaggtgactgtgaatctgttctttctcaacacatcctgtctgtgccatgggtcagcccttggcacctcccactgggctcatggctgtgccacctgtattcgagtgttggggatggtcaggtgggaaaaaggatttgggctcctaatgcatggtgagaaagacaggagcaagcagataaccacacagtggatgaaagctcacccccacccttgtttggagagagaggcctgagcatagggaagatctgcccaactccaggaggtcagggaaggcatcccaagggaggtgatgactcggctgaggtctgagcaggcagaggaagctgcacgtgcaagtccctgagcaggtgatatggaggaggggctggaaggagacctggtggctggagtgaggagattccacagggccaccgcctaggccttctttgtaacagcagtggggatttttggaaagttttggggagagggcagggacatgatcttatttccaagttgaaaatctgtctttgcagtgagcactgtggattggacagctgttagctgagggccccagaatgatccaagcaagtggtgggctgtgctaggggtggagtttgaaaggagagattttgagaggcgttcacgagcccacacgtaagtgggctccattgtggtggaggggaggagggaaggccgactcccgggtctcccgctttgccactgcgcaagtagcaggcacgtgctgtaggaagagctggtccaggcacagggcaggagtgtggggctggctgtgccaaactggagctgccttgcagacaggaggagaggacgaggaggcagctggctctgagaaggctcactcttcagagccactgaaagtgggaggtcgaaaagtgtttgtgggacgggacgtccgcctggccctgggcctctgctgacctctctgaagatggacagagaagacacagagtcattagaaagtccagacatcagggcttctttggacctgggttcaaatcctgcctctgtagctctgtgaccttgagcaagtcactgacctctcaagcatagttgctttgctgcttatctggtttgcttggaggatggtggtagctgttaaatgagtcagtggatctaagcgtcactaaatggtggttgtcactgggtcattatttgcataagaattcagaagcaggcatttatccagatactgcatcagaggagcacgctccagccaggatgcagatgctgcagcagaggggcacactccagccaggatgcagatgctgcaacagaggggcacactccagccaggatgcagatgctgcagcagaggggcacactccagccaggatgcagatgctgcaacagaggggcacactccagccgggatgcagatgctgtaacagaggggcatacaccagccaggatgcagatgctgcagcaaaggggcacactccagccgggatgcagatgctgcagcagaggggcacactccagccaggatgcaggtgctgcagcagaggggcacactccagccgggatgcaggtggtgcagcagaggggcacactccagccgggatgcagatgctgcggcagaggggcacactccagccgggatgcagatgctgcggcagaggggcacactccagccgggatgcagatgctgcggcagaggggcacgctccagccgggatgcagatgctgcggcagaggggcacactccagccgggatgcagatgctgcggcagaggggcacactccagccgggatgcaggtgctgcggcagaggggcacactccacccaggatgcccctgtttgccgtccaggatccctatttagagtgggtgatcacatttgcagtgcagcctcacagctggctgggaggtagcctgctccatgggcctccctgcttctttctgtcctcaggcaggtgacctaggatccttcctgctgtaagagaaagaaggagttgtctgagtgagttacctgctctgccctggcccctctgtggggtcagagcaagtgggcatccccagaagcaactatggaccgtcttctgtgtacccactgtagctctgcttactaaaatatctgtaagccccagtcttcatagcccaatagaataaacagcgaaagcagaaagtttagctgacaaggatgtcaaaagaaaagaatgttctgattaactccactttttttttcaactgggagctttcctaacatcacttaactcttctcgttgaaaataaagtataccaagtactgggtcacatgaccatctcaactgtagccactctggagtgcccaggccacttccccatccatcatcccactgggtcacagcaaccccagagctggcagggacttgttttatgctggtgtcattgatgaagaccccaagtctgtgacaggtaaaacaatttgccccaagtcatgcagctgacttatggctccagcccagggtacccggtgtgcagcccccacttcaccccactgcaggccactgttccagtccaggtctccatccctctacccagagtcccttcatcccaggctgctggctgtctactcccctctgtggcctcagactcccctcatcccatgaaagaggctgttaggagagaaaaccctggaagcccctttcggcccaatggtcctggatgtcctctgtcctctctatgccttggagaggtgcttctcctggtggcctggcaggaaagagcctccccagggatccctaggtctcctcagggttgcagccaagcttggggctgggccgggcatggttgcctcgaggggccaacatggatcccagggcttgcggcttgttcagtaggtgggtgcgggctctgccctcacacagccttcttggggactggtaggtgtggagtggggggctcagaggctcgtaggccatcaccccctgccctcggtgctcctgcagctgtggagacataaggaactgccacgtgcatgattcagagtggccctaaggtcagtggtcaaagccatcaggaaagcttcgggagcacccgccaagaggctgtgtgtactgtgagcaggaggcccatggagccagaccctgcagtcagggcagcctgcctggaggagggggcacccaggaggggtctcagcaggtctgagcaggcagaagggaggaacgcagttatcataagcctgggaacagccaagcacagacatgagtgtgcttgagcaacccccagcatcatttatgggcaacaccaccagcccatggggaacccggaggcctggaaaggatgggtgggcaggggccagcgggacatgagaagaggctgctccatgcaggtgtccagaaagtcaaggacaggcccaagcatttactgtgccctaccatgggccaggtgcttctcacgcttcgcctaatttacacctcatgccagccctggtggtcagcactattagagccctttaaaaagaggagactggctctgagggatctggacagggcaggaagcttggcttgtggagagtcatccagcagtgttgtcagaccatttctaggccaccgtttgttcagggcagagacctagaatcctgatgggggcaccgtgatggggagcagtctggaaccacagtggaagagcctttggtcctagggtgcagggtactcttgtctggggcaagccctcttcccttccacagttatgtaggtgtgcgacagcagctggtgagggctgagggcatagccatgtgtccacacatatgtgtgcatatgcatgtgtacacatgtctgcgtgtgggtgcacacaagtgtttgcatgcatgggtgatgtgtgcacctgcgtacatgtgtgcctgcatgcatgtggtgtgcacattcaaagcaacagcttcccagagcctcgggcgactttagaactgaggacctcagtacgcagaagcacctgcctgtgtcaggttgcctctcgctgccatgtcctcgtgtcctccctaccctgttacagcaggctgcccagtaggctctggagagacagccaaaggcccagacattgcgaagagtctgggggccgccattcaggcctctgcttggcaaatgccctatcagggggcactttagtggtgattccaggtacaacgtgacctgtgaccttggagcacttacttccattccctctcttccccatggaattctccatagcagtgggaacaggcaagcttctgccacacacaatagcatggagaaatcttacaaactgaccatgtggatgaaggaggccagatatgaaagagtatttaaaaattccatttacacaaagctcaaaagtaggcaacaagaagctgtgtgttagaagccaggatagcagctgcccttgggctggaagatggagggggcctgtggacaatggccaagcactgtttcttgacctggggctggcttcccaggtgggctaacttggtgagaggccaccgaactgctcacttatgattcgtgcacactcctgtcatgaggtaagcattgctggattccagccctggtctctgcacccagtggtaaatacactatgctcagtgctcatattcactcgcccaaacaccttacatgcacttctccagtcctcaccacaccctgcgctgctcagtccattttacagatcaacaaactgaggccgagaggtgacatccttcgcccaagagcccacagctggaaagtcggcaaagctaggattcccattagaccatccttgcaggctcttcctatcccccacccacatgtcaccccctcccccatccccagtgatgctgacctgtcttgtgttgactatcccacagtgtcccgtttctccagcccgcgggtgacgccccgcctgagccgcaagcgggcgctgtccatctccccactctcagacgccagcctggacctgcagcggatgatccgcacctcacccaactcgctagtggcctacatcaacaactcccgaagcagctcagcggccagcggttcctacgggcatctgtcagcgggtgccctcaggtgagccccgcctgcaagcagagagctgaggaccagagctgggctgagggcccggtggggaggcgctggcttttcagtgggcgcttttgacccgaggagaaagacaggacctgtggcatttgtgaatccacatacttgcaccttttttatgaattcaaaaccaataatgatcaaattgaaatgagcccatatctgagtacatcttcatggaccaggcctgtcatgaatgactcaaatgtgaaatcaaaggtgtttgaggtcaaagatggttttcctagtatttcactgaatttggtggagcagccaagtattggccaaccttggagaccacacaaaatgtgacattgacatggcccatgctctcagcaagcctctgggctggcagcaggcctccctctgtagccgcatggtggcacacccaagcctcactgacactagccacccttctcccttctgtgcggctctagtctgtctgaggactcagaccccagccagcttgactgaaactcacatgcctctccagcacctccggaagaggccaggaggagttaggaatgtcaggagagtttgtcccaacgacctggagatggaaggaataacaagtgtatttgttatcttttgctgcctaacaaattgctccaacgcatagcagtttaaaaccacaagcaattgttctctccccccatttctgagggtcaggaatttgagacaggctgagctccggctctctcaggtggccacagtcaagctgtcagccagtgcttcatcccgccgaaggcttgactgggccagaatgccccctcacagcgctctcagcagtgtcctttgttcctcatctgtgagcctctgcttagggctgcttgagtgtcctcacaacatggcagacgggtcccagcccaccttgcagcctatgatgtgagaggaagctggaggaagccacgatgtcttttacggcccaaccacaggggtcaccaatctttccttggtatcctgctgtgtgaaggttggctcttatgcaagtggtgtgacagagcctagaagtgcagtaagaagaggagaataatgcaagctggagggctcagggcaagattcctggatgagggggcattggaacaggattcggaggcctcatgggtttcacgtagtcagggagcagcgatacagacatgcgtctaggtatcacagcagtggagaggccagggtgtggggatgagctggagcctggtccctgctgggagccagcctgccaggggtgaagtctgcatcctggggcagaacctgggagctgatcgcagaaggtgagtggcagacagtaggaagccacagctggttcttgagtgaggaagccacagtgatggtggggctagcaacatgctcatccctatcccctgggcaaggttctctctgtccaggaagtgtcagcctaagagagctcccgatcccccacccccacttccttgtctgctctctgttgcagcccagccttcaccttcccccaccccatcaaccccgtggcctaccagcagattctgagccagcagaggggtctggggtcagcctttggacacacaccacccctgatccagccctcacccaccttcctggcccagcagcccatggccctcacctccatcaatgccacgcccacccagctcagcagcagcagcaactgtctgagtgacaccaaccaggtaggtgggtgcaggggccaggatggccactgggtactcatctggacacatgagggttgttcactgccagctcatgctaagaacttgtggagggcctctggatttacgtctggccgctagggtgccttctgggcagaggccacgttacagaaagggtgagacctgggctcagtccatgggaagctcccagcttcttgattctgccgtctcctgtccaagaagcataataagtagatggagaaagcctcgattcccagggcctggcaccatggaggcactccatgcacagcacatagcatgggtgggtgagtgaatcattataagactgtgcagtttcgtcgtagaacgtgcatttgcagcaggctttcacacactgcctcattcgacccttccaacgggccttgagcatgcctgggcatcctagtacagtgcctggcacatcctaggtgccattattatttggcaaatgaagtgttcttttacaataaggacatggaagggcacaggccttagcatcagtcagaccatctttgggatcccaacttgcctgaaagcagcacatctctttccctctcgcagcctgagctaacttatctgcagagtgggattcctgatgcctaggtggggtcactgtgcatacaaacaagctcatgtgtgcagagcccccataggctctgatcctgggagcactgacaacgacaatgccagaggtgaagggaccaccccaggccacccaccagcaaatggcaaagcctggatgtggctacacccttggaaggaagacaggacaccatgtcctctagaagtgtcctctgttccagaatgtcctccctctccaccccagggctcctggtggctccccagagcctccccacgacagtggctgtcagctctggaaacatcacctgatactttagctctagccccttctcctgaggaactgggctctggccccctatgccctgggctggccaggccctgttctcagatccagagtgtcccctgctctggagggctgagaagttgagcctggtcagaacaggagcaagggcaccctgcattttccaaagagaaggtctctttcccatttcccagaagtcttggggaggcggtgatggagagatgggggttggcatgcccgggtctgggtgctctcctgtagcaggacatgtgcccccggcaggactgagctggggactctatttctgatactttaaacacagggttagcccagatggtctgtgcggagagatcctagagttaaagtccaaaaaaatttgggatatccctgccctgcccctgagtaatagactgtcctctgcacccttcctcagaacaagcagagcagtgagtcggccgtcagcagcaccgtcaaccctgtcgccattcacaagcgcagcaaggtcaagaccgagcctgagggcctgcggccggcctcccctctggcgctgacgcaggtaacctgctgccagccgcaccaccttcctccagctaggaccaggcctgtgggctgccttggggctgtacccttggtggtgaacggatggctggctggctgcctgcatggatgaatgagtgacccagggaggactgggtgggaatgctgagctgtgactttctcaccactgtgttcccagcaccctggacatactacattcccatcacacgtggtgaatgaatgaatgagtgaatgaatgaacttctgcctagccatccctcttgtctcaggctgcatctgtctctctctccccacacctgacctgtgtacagcaccagccacagcctagctgagttgctcacgtccccggaatggcccaggcccttctaggctgctgtcgctcttggaactctaccccaccctggctccttcgctgccacttcagcccttcctgattctcctgggtgataggactgagctccaggcccacacacccagcctagctcaggggtcacttgagggcatgtgctgtgtgcacacctgtctccctgtctgcactctaagctttggagaggtggcgctatgggagaagtgcctgactgggttccatgccaccagggtttgtgcaagtgtgcagtcactgacacagtattttccaatgattcaatgcacatttgagtcagtgagtggcgtggtgaggggggaagacaggacaagttcaagcggggagagaagagcggagcagcccacagcccagtgcaggcctaccacgtggcccagaccctgtgctgatccttttggaaactttgccacttatttcttctgctccaagacagcatgcgggcagcccccactcttggagcaggggcctgtcttgtaaagggcatgccgtgcctgttgacctggtaagtaagcccctggtcccccaagccctctcatggtggcccagtcttcattcattaccacagaagccgcatcttggacaccaaggatgctcagggcctcctatccctgtctcccctgcatctgccgagcatcctttatcaaaactgtgaaccatcaggcatgctctgggcacttaattttcatgaaatattggcttctgttatcgtcaagcaagcagagaggttgatgacaaattcttctccccttgctgacaccaaagccggtctcagcacgatgcatggtttccacggggccgaccatcatcgggagccaatgaaattgatgaggacggcacatatccagggaagataaacacgccagaaaggcaaggacagggccggcaggcaggcactgagcacctgggagccccatggccacacgccggtagggccctatgcccgccctccaaccctggccggccatacagggcctcctgcctgcccagcctggctctgcgcacgtgtcagtgcaaggaaagctgtttatcatgaggaggttgtccccccgtcgctcagtgtcccgattcactgaccaaggactccctgactcatttgtaaggtggatggctgacttccaggtcttctcaaagagtggagagggtgatgggaggccctctggtccactctccccatggtctcaccccaacagcccccagacgatcccattgctaaagatctggaaaggaaatgctcccacaccttcctttgacttgctcccaatgtagcccctggagctattgtacgacatgttgttgctttcctgttgggaacaagtggattcgttgaaaggtcctttgagaaacaatcaggaacccttctcggaagaggtctttgcagctcttatggaaagtcaggtggagtttgagtctccattgacagcagggcgtcctgaggctaatttcttccattcccagaaagggactcagcattaggactgaaattgtgacctgggcagctatggtaccactcattgagtccccggagccagtgggggttaggccttttgagtatggggcgaggtccttcatccccctgagcctgactatacatgttttccccagagactattctgaaagacaacattttcctgctggttttggagagagtttgaagtgcgaagcaatcttggtaacatctgcctctttgcttggctttgctcccagccttcctagcagaccagtggaatactggggagtccttgacagcccttgtaggccctccgtggactttccgtccctacctggagtatgagcctctccctgtgccccgaccccaggcaggtacctcctacctgtcctcatgttctctgctcagagggtgcccctggttagcatcagtgagggtagggatggtcttgtgggttaattctcagtctgttgccagtttgagagaaaaagactttgtcctttttgacgggaatttcagggacctgtgatcaggtgaaggaatttcaggtacctgtgatcaggtgaaggaatgtctcaggggtctttccttcgcctcattaaaatggccacatgggccctaatgtggtcaggggactcaagtccagacctaggctgcctcgagctcactgtgtattcatggggagggcctcggatcctccctatcgtacaagaatgcagatgcccatgcgttagggctgtggcagggaaaactggttccccacagcacttcgatgaagacaagtgtgcactggagaggaaggaggaagggccccaggacaggccatctgacaaggagagctgtgggcggggctgagttgaggaaaggagctaaaaaggctgatgagtgtgtgtgtgtgtgtgtgtgtctgcatgcatgtgttgtgtgtgtgcacacacacctgtaacacacacacttgcatccacacctgtaacagcccagggtccttggcacagaatgcatgggactaacagcgacctcttttcagggccaggtgtctggacacggctcatgtgggtgtgcccttcccctctcccaggagcagctggctgacctcaaggaagatctggacagggatgactgtaagcaggaggctgaggtggtcatctatgagaccaactgccactgggaagactgcaccaaggagtacgacacccaggagcagctggtgcatgtaagcttttgaaccccagcagcccgccaaccggggcacggcccaggccatgcaggatgctgagccttccagggcctctactagacagaaggggctggaggaagagacccccagagatgcctgggccacatcccctgcaagtgggaggcataattacttatgtgtgtcctgcctgtttttaagatggcttccaatacatatgtaatacaaacaattaaaagaaaaaataagtaaatgagactgtcagggaaaagagaacaataaagtgaaaccaggaatagagttagtattaaaaaccgagtgctttgagctatattctatatacacattttttttttctgagattcctaatagccagtgcaaagagggaaatacgattagttaaaccagccagtatctacacaataataagtgaaagaagcttctcccatgaaggaaggagttgatcctttccttttggggactattcacagatacccagtggatatgggtgcaggtgggcgtctacacccagatcagagaggaggttgcttaacagtgcctgagtactgacagctcaggtgattagagatgaccatgggagccggcgagaccttcaggatatgcctcttggtcctcattccaaactctcatactgcagcgtcccttatatggcagttaggggtgatgtgtgcaatgtgcagagcagaggcttggcacgggagacacctggctccaaacctgtccccaccacaaccagctgagtggttctgagcaagtgactccacctctgtgagcttcatttgtttcccataaagggggttgatgctaccccacaggagggtcaatcatgtttgtcagcacttagtgccttgcagacattccgcacctagcagctccctccttcctcctcctgcctgttccccacaccagccctgagtggttctctcttctccatccagagaagaacttaaattcaagaaagccacctcccaactccccagcacatgctccttggtgagtgagtgtctataaagatgaacccactaaattagtagctcgattgctgggaagagcagacacacacgcacgtgcacacacatgcacacacacacatgcacgcgtctccgattcatattcagaagctgtccagaggcgcttgcttctccccagctctgtgaacttagcatttaggacacgccgactccctctgcttcttccacttatgcaacttgctcacaaataccgtaggtttcttttgtgttggagtttgtcctcccaaacacagttctcacccagaaggccagaatttcccagcaaacgaatgcagctggtgaagcagggtcttatctaaccccttctggatctcaaacttaatttttcaacttgtaccacctctttggggtaaacaagccctagatggagcagggaccgtggagctgtgagttgcagaacaaatcagttagatgaaaggaggagagagggacagtctctcaggccaggggaaggccaaagccagagcatgcagatgaggatgtcaaagacgtgctctgtgataagtgggtcagccccaaagagcaggcacggaattcctcagatgaatgcggagggtccccaaactgggaggagggctttagccaggggcttctgcctgtgccctggactgtcctggagctataggtggccacctccaccaggccctggaaaaagcagaccccttcacccagctctgtctgtctgtctctctctgtttctctctgctccctggaaagatggatggagcaggcgcacaggcgagctggagcccctggtcgattattaacaatttgttgctaagtaaaccaataagaaaaaaatgaaagccattgtcaggaagcatttttatcatttgaaaggctttaaaaatggaaagtgaggctaatatgataagatttccctggaagttcaaagcgctggagatttcacatgctccagcaggggcatctgtacgcgtgacagttgggcgagtcgcacagggcatgagggcctggcagttttctgtcttctggggcaaggtgctgccagtgcctgatgcttggctcttgggacagcctcttttggtggcagagttccacagcagaatgtccagcagaacaatattacaggccacaaatgccagctatccatgtaatttacatttcctaggagtgcatttaaaagtaaaaagaaacaggtgaagttaattttaatattttttatccagcccaatatatctgaaatatcatttagcaggtagtcaatagaaaagaaagttattgagatattgtatattcttttttttccattctaagtctttgaaactggtgtgtagtttgcacttctagcccatcccagctcaggccagccacatttcaagtgtgcaagagccccacatggggcaagtggtcactgcattggacagtgtgggtctagaggttgtgggaggggggctgggaggaagtgaagacgggggaggaaactgagaacagaggaggaaggggaggcctctaagacctgagtgtcctggcctcgccaccaggctggggaagtaaacccagccttacccgagatacgcggcagggttagtcgtgctgcgctggctgtcccaactcacttgcctggggccgttttctcccaggataagcttcacacagtgcccagagcccaccattaaggtcagttctggctccaccacgccgactgccagggccctgtgcaggccactgaactctctgtgcctttgtggaaaggggacaaagccattatctcatgggtcaatgccaaaaatagagataagcatgtgttatttttctactgaaacaaaatatgttatttacaaacctctgaaacaataggggcaagcttaggagaggcttctcatgcacccactacgggcacgtttgcctcgctgcggttagtgcctactgtttgcagcctgggagcgtcatcacaccagagcccaggctgcggtgcacaggatggctttgcccaatatagacggtcactttgaggactgattggaaaatgcagggcagataagcggcacgcagtaggccttcatttaagggcagctagtgatgattcatgaggaggcgtggcccggctcgtaggggtggtcttgttgggtcagtggtctgcgtatagtaggtgggatgggcaatgaggagcacggtctgaacataataggtgtggtcagcagggtggatggtctgcacacaggtcggggagggctgggggggtgccggtgcaggtggtcagctgacagcagggggtggtctgtgggcctctggccctgcttaccctcttctgggcatgtccctccggcagcacatcaacaacgagcacatccacggggagaagaaggagtttgtgtgccgctggcaggcctgcacgcgggagcagaagcccttcaaggcgcagtacatgctggtggtgcacatgcggcgacacacgggcgagaagccccacaagtgcacggtgagtggccttctccccacccccgccgcagcatcaagactggcctgtcagccaggccggggggatcatgtttggaggtggctggccacaggcacacctgggtggggcagaccacagcaggggctctgggacaggagcctgttcccaccctgcctgtttgggtcctggaggcccctcgcctcgtgccgtcccagaccttgatggacttgctctctgggtgtgagcatctcggtaagcatggcaaaaatgtgtgggtgtgtctgtgattgtgagtccaaaggcatatctgcaccctgcagtttgcttggctgggtgacgctgggaagagggacagctccatagtgctctgcagagaaaaaaacatcattggtgattcagagcttgagcaatgatgggttaaaatggttgagggtttttttgtttgtttgttttttgagacagagtctcactttgctacccaggcagctcattgcagcctccacctcctgggctcaggcaatcctcccacctcagcctcctgagtagctgggactacaggtacatgccaccaacccagctaatttttgtattcttttgtagagatggggttttgccatgttgctcttgaactcctgggctcaagcagtctgcctgcatcagcctcccaaagtgctgggattcgtcttgagccacagctcccagctgagttattttttttttaagtgagctcaatgataagaccttttctatggtctcctttagaaggtcaacaggatttatgactatagttggagagacttatttttttaacacacagaaactgctgccccacaaatgcacacgtggtttcagctgtagctgaaacatctgggaactcctttttgtgaattcttgtttcatagattctgagacatacattttgttttcaccttaatatctctgaagtcagactgtcttaaaatcagtggtgtccaggatccaatgaaatatgctacctttgctggcaagtcagtttttttattgagaaatagctgacataccataaagttcacccttttcagaaaatgtgcaatttagttgtttttagtacattcacagatttgtacaacaatcactactagttaatttcagaacattttcatcaccccagaaagataccctgtactcattagcagccactcctaattctgtccttcccacagcccctcctaattctgtccttcccacagcccctcctaattctgtccttcccacagccctggacaattactaatctgctttctgtctgtatggatttgcctgttctggaaatttcataaaaactgaaatcatacaatatgtgcatttgtgtcttgcttctttcagttaacacgtttgcaaggttcacctgcgttgtagcatgcacgcgtactttctttctttttgtggctgcataatactccattgtatggatagaccatgttttgtttatgcattcatcagttgatggatatttgcattgtattcactttgaggctattatgaataatgctgctatgaacatgtgcgttcatgtttttatatggacagaacgttttcacttctcttgggtatgtgtaactaggagtggaattggtgagtcgtatggcagttgaggaactgctagtctgttttccaaaaacgctgctccattttacctttccacccacaatgaatgagggttctgatttctccaaatcctcaccaacactggttgttacctgtcttttttattctagccatatcctagtgggtataaagtagtattttattgtgtttttgattagcacttccctaattagtgattaataatgttaaacatcttttcaggtgcttattggccatttgcgtatcttctctggagaactgtctacccaaatattgcccattttgaaacctggttgtctttttgctgttaaattgtaagaatttttcatatatctggttactagacccttgtcagatatatgatttgcaaataattctcccattctctggattttcttttcatttccttgatactttcttttagagcacaaagttcttaattttgaggctgtacaattttttaattgcttgtgcttttagcgtcatagctaaggaaccattgcctaatccaaggtcacaaaaatttacctctatgttttcttctaagagttttatagtttatatagacttttatttatagaaatattgaatactggcactctgaaaaatttaaaaattaaaaaaagaatatatgtgtgtatagagagttttataatatagctcttccattgaggtctttgatccatttggagttaattttttttttttttgagacggagtctccctctgtcacccaggctagagtgcaatagtgccatcttggctcactgcaacatccgcatcccaggttcaagcgactctcctgcctcagcctccggagtagctgggattacaggcacgcaccacacgcctggctaattttttgtatttttagtagagacggggtttcaccatgatggccaggctggtcttgaactcctaacctcaggtgatccccctgcctcagcctcccaaagtgctaggattacaggcgtgagccaccacgcccaggctggagttaatctttgtacatggtatgaggtagggatccaaacttactcttttgcatgtgattatgcagttgtctgagtccatttgctgaaaaattgttctttccatttgaatggtcttggtatccttgtcaaaaatcaattgaccttaagtgtctgggtttctttctgaactgccagttatattgcctggatctctatgtctctctttatgtcagtaccacatgcagtctttattactgtcaatttgtaggaagtaaattggggcatatgagttctccaaatttgtcctccttttgcaagatggttctggctcttcagggttcattgcaacaagttattttcttaacatcctcagtagtggcaaaccatagccctttgatgatatgagctgtgagttgtggaaacagataaaaggcgtttggagccaagcatgctcaatcagactggtcaggaataaaggggaggatgggaggaatgagacagctcctgccgggtgtacgtgtcctcctgagggcggttttcatacatccattcaatgcaaccacagtatctttggaatagctgcagagcttcctgcaatgatctcttctttctccccttcctcccttcttccctctctccccacctcctttccttccttcctctctcccttgctccctcctttcctccttccgtcctttccaaaaatgtttcttgagtgcctagatgctaaatattaggaagacagcaatgaacaagacagaagattcctgctctatggagctggtattctagtaagaaggctgggtaacaaaatgattaagatcattataaatcgagccaaggggtataaaggagagaggatagagtgttgtgattgagaatatcagaaaaatgccctcagaggagatgacctaaaagattgagagggagggacctgggccaggaaccggattgggtgggggctgcagaagtttccagccagaggggtcggtagtatgcagaggccccaagccagaaagaacttagtggagtcaaagaactgaaaggagaccagcatgtccaaagtgaagatgagggtggccgactcactcaaggacttgaaggactgaattttattctcagcatgttttagagcacaggacaattctaaccgagagtggtactgggaaacagttcaaagtcatagtttagagtttaatgatatgggaatatgctgctgatttaaaaaaatagagtatgtaactgaatacttgacatgttcccaattttggttttaaagacatgtggagatgaattgcagactcaccagaatgaaacttacctgcgtgtcagcagtagcagcccctgggcgaccggtggttttcatttttctctttgtacctttcagccctttccatgttttcaggaaaggaaagtaatatccttaaaatgcatgcttctgagtgcgctgatggggtggagcagagcagagaagggggtggggaggaagcagcagccggcctcaaggttgggccccctggggtgccttgactgactgaaccgcctccttctagttcgagggctgctcgaaggcctactcccgcctggagaacctgaagacacacctgcggtcccacaccggggagaagccatatgtgtgtgagcacgagggctgcaacaaagccttctccaacgcctcggaccgcgccaagcaccagaatcgcacccactccaacgaggtacctctgcggggcatgcactgggcatgcacactggggccccactgatgccccatggcttccaggcatctgtagtccagtagatagccaggtgccccatgtcccgcccccgccactgaccagctatacatcctcagatacagaccaggactctttgagacctagacagaccggtctctttctctatgccacatcctttcctctaaaagatgccccgtgaggtcccatggcatactgaccctctctgtgcctcaatttccttatctccataataaatataatagtgccctccccaaaggccatcatgaggtcctcgagagttgaagttgaagcagggaagtggcccttctgatctcggagtgtttaacatgcatctgctccctattacttggggctgctgggtgggctctgcctccccatcctctagatgaggaaacgaagactcagagatgaagtgactttccccagtgccagagcagtgatgatccctctgcagctgtgaaaacatcctgggtcactgctccccacccccaaattccctttccaccacaagcaggtgttccactggggagcagctgccccactgcctgagggaagcagagcagtgctgtctgagcttggcgtttgttgacagccccctggcctgttggcttgggcagccagcagtgacatgctccagctgttagcgctgcctgggcctgccgtggctgtcagccccagcagacggggcacagagcagcctctgtctccctgggtaggcagagcccctatctgggctgagagaaccagggagaaagcagggcaagagccggtggcatcctggcccagccacacaattactgtcgctcaggcttactcggaaatgtatgtttttaaaagcttagacatatcctggaccccaaagggactttgctccaatgcttgtaagaagttagaggaattttcaaaggcatctgaacccctcagagtctctatggacaagagccagccttagaggggagtgtgtgtgcacatgtgtatatgtgtgtttgtaagtgtatgtttttctgtagacgtggtgtgtggggtgtgtgtgtgtgtgtgtgtgtgtgtgtgtgcatgtttatgagtccaggactgaggttcggaaatcctgggttttttcaccccattactggatgacttggaacctgttcctttgcctccctgatcctgcctttcttcatcagagaaatcaggggtgctagtgctgtcagagggtacactgagctcgtacacttgctactagtactaaaaaccccactgccctgttcattgagaggcagcattgtgattacacgaggcacatgtgtccccagcttcttgtggcaggaccccccgtggccgtgtgcttaactgcatgaacaggtgcagacaagccaggctatggccaggctcctgcatggtgccatccacagagcactggctgcaaatttgacacagcacctactgacgttgccagctgggctctgctgaggggcgtgggtagcttcaggagaacagggagagcgccccttcagagttgatcctcgtacccctatccatgacacaggcctgcttctctccccagaaaccctacatctgcaagatcccaggctgcaccaagagatacacagaccccagctctctccggaagcatgtgaaaacggtccacggcccagatgcccacgtcaccaagaagcagcgcaatgacgtgcacctccgcacaccgctgctcaaagagaatggggacagtgaggccggcacggagcctggcggcccagagagcaccgaggccagcagcaccagccaggccgtggaggactgcctgcacgtcagagccatcaagactgagagctccggggtaagcggagctgggcagcccagccacgcaaggcgactccatagccgtgcccagggccaccccttgccacggttgcgggctctgccctaaggcccccctctaggggcacagcgatatccctcctctctccaacttggctttcccccttcaccaccttgggcctcacatggaacctatcttgtccaggtcccattctgctctgaccaggctcctgctgggtgtgtggcagcacgctgggtgacagggatgccgccctgtacggtgggcctgcacagggcgggggtggcccctgcaagtctgcctttccagccagcacccaagtgccactgccagcccccactcctctgtcctgtctctgcatccccacccctctggcgtccactccttttgttctaaccacctgttctttgtctccatctctttttcctgactgtacctcccctaaggatagacggtactgaggtgagccaaggagctgggcatgtgtgggtgggctgggggagtgagggtggctggggagccggtccatgctgctgcctggcagagactcacctgtcagtctaggcctcctaggcccaggcaggtgggcccggacaggcacacggcagggcactgcaggtggggccattggccttggcagccggagtggaactggcaggtgtggggagcaggggcgccaggctgtatcagggacagagtgacagggaggcatgcgtctaggctacagaaggtcctgagggtcaaacagaaaaatgtgggtggcgccatggacaacacctagaaggtccctgctcccattaagcctgtgtcctcatgggaaggaagatcatgccttcccaagaaagctggaatttggggccatttggcctaacaatgagcccagaggtggtggtgcatctggtgcaagcctcatctgggcccagatccgagttctgtggatgtcgtccgagtggatgttgtccgagttctgtggcattctgcactgtgtacatgtgccatgagctccctgccccactctacctaacccagagggaagactgttttggggtggccctttacacaagggctgcatcccacaggtccccctcctggtcatcctttccctttcccacaacctgcccctggccttttgagatcatcctgtctggttgaagccaccaagtcagcaggcttcattcctcacctcatcagggtacatggctgttggtgggagtgtttaagtgccttcctttgtgccatactgggtgccttctgcacgctgcgtgctgtccacccacccactaactctgcaccggaatcagttcaggtccatctcatagttggggaagccaaggttaagagaagtgaagtgacttgaccgttttaagcaaacagactcatgacgctttacgtgctcctccgcaaggcagcttccttccctcaccctcagcccctcagggtgggcgagggtgtggtgcctgtgcaggcctagaggcaggaccaggtggaatctgataccctctgagtctgagccttcttgcctcgtcccctgcagctgtgtcagtccagccccggggcccagtcgtcctgcagcagcgagccctctcctctgggcagtgcccccaacaatgacagtggcgtggagatgccggggacggggcccgggagcctgggagacctgacggcactggatgacacacccccaggggccgacacctcagccctggctgccccctccgctggtggcctccagctgcgcaaacacatgaccaccatgcaccggttcgagcagctcaagaaggagaagctcaagtcactcaaggattcctgctcatgggccgggccgactccacacacgcggaacaccaagctgcctcccctcccgggaagtggtgagtaaaggcctggggtttgcagatggggcagaagagagtctggggcagcaccaactaggctggcacccaccaagcaccagtgctatctcaccggattcctacaggatcttaccagcccagtacagaaaaggaaactgaggctcagagaggtgaaatgccttacccaaatcaatggcaggggtgagattagccaaaggccatgctctttcaactgcaccattctgagtccttataaccccccaaaacaagcagaccctgcgcacatcatcctcttcctcacccattcattccttcactgatgaggcacttgctgtgggcaccatggcaaaggccctaggcaggagagccatttaattccagtcccaaaggagcgtatggttagaaggctgtgccaccagattcacactctactgcagaacgagccaggtaccaccaaagccagagcttagggtagagctgtgcagaggaaggagaaagcacattgagctggggatgagcagggaggacttcatggcggaggcagcactgtgctcagtctcaagaggtgttggccaggctctgagatggaaggcgtctttaacgagcatgtcttgggtactgactctgtgcctaggattgtgccgggctgcccactgtggtcaacactgatgtaccacctgctctcacttgaagggaggatttgttgtcccaacttgtggggactactggcaaatggccttgaactctcagccccctacagggatgtcctgggttgcagacagatgccccacccaaggtcaccccttcccagcagctccgcatgcaatgactggtcactgcaggagtgtaaaggcccagccatcaagatgaggctcagagaggtgcccaactcagggcagcactgaagagccattgggggtcctgggctccctgtgagatcatcctgggctcacgtctcctctgcccactcttgcagcctgtctttccttccatgggtatggacctcagggtactccctgtaataacctgctccttaaactccatctcagggacgcctaggtggcaccacctccacagactgtgagggtactgtgccaggagaccaacctgggccttcctgagctgctcatcccctcctctgcgtaactcagtcctacggagaggcacatttatctacagctagagaaactgagggccagagaaaggagaattcaaggccagacagataatggtaaagtgaagatagggacttaggcctcctggcttcccctcgcccacccttagcaataagtgccaccatttgtttacatattgctttttccttcccctttttaattgaaaaaccatctgctcactgggcacggtggcccacgtatgccctagctactccagagtctgaggagggaggatcccttgagcccaggagttcaaggccagcctgggaaatcctgtctctaaaaagagaaagagagaaagaaagcatgcatctcctgagtgcgctgtgttgcaagccctcttctcgggctccaggcccagtgcgatgactgagcacggtcaaagcaagcagccacccacccttgtcccggtgctgacccctctgctctcccgcaggctccatcctggaaaacttcagtggcagtgggggcggcgggcccgcggggctgctgccgaacccgcggctgtcggagctgtccgcgagcgaggtgaccatgctgagccagctgcaggagcgccgcgacagctccaccagcacggtcagctcggcctacaccgtgagccgccgctcctccggcatctccccctacttctccagccgccgctccagcgaggcctcgcccctgggcgccggccgcccgcacaacgcgagctccgctgactcctacgaccccatctccacggacgcgtcgcggcgctcgagcgaggccagccagtgcagcggcggctccgggctgctcaacctcacgccggcgcagcagtacagcctgcgggccaagtacgcggcagccactggcggccccccgcccactccgctgccgggcctggagcgcatgagcctgcggaccaggctggcgctgctggacgcgcccgagcgcacgctgcccgccggctgcccacgcccactggggccgcggcgtggcagcgacgggccgacctatggccacggccacgcgggggctgcgcccgccttcccccacgaggctccaggcggcggagccaggcgggccagcgaccctgtgcggcggcccgatgccctgtccctgccgcgggtgcagcgcttccacagcacccacaacgtgaaccccggcccgctgccgccctgtgccgacaggcgaggcctccgcctgcagagccacccgagcaccgacggcggcctggcccgcggcgcctactcgccccggccgcctagcatcagcgagaacgtggcgatggaggccgtggcggcaggagtggacggcgcggggcccgaggccgacctggggctgccggaggacgacctggtgcttccagacgacgtggtgcagtacatcaaggcgcacgccagtggcgctctggacgagggcaccgggcaggtgtatcccacggaaagcactggcttctctgacaaccccagactacccagcccggggctgcacggccagcgcaggatggtggctgcggactccaacgtgggcccctccgcccctatgctgggaggatgccagttaggctttggggcgccctccagcctgaacaaaaataacatgcctgtgcagtggaatgaggtgagctccggcaccgtagactccctggccagccaggtgaagcctccaccctttcctcagggcaacctggcggtggtgcagcagaagcctgcctttggccagtacccgggctacagtccgcaaggcctacaggctagccctgggggcctggacagcacgcagccacacctgcagccccgcagcggagccccctcccagggcatccccagggtaaactacatgcagcagctgcgacagccagtggcaggcagccagtgtcctggcatgactaccactatgagcccccatgcctgctatggccaagtccacccccagctgagccccagcaccatcagtggggccctcaaccagttcccccaatcctgcagcaacatgccagccaagccagggcatctggggcaccctcagcagacagaagtggcacctgaccccaccacgatgggcaatcgccacagggaacttggggtccccgattcagccctggctggagtgccaccacctcacccagtccagagctacccacagcagagccatcacctggcagcctccatgagccaggagggctaccaccaggtccccagccttctgcctgcccgccagcctggcttcatggagccccaaacaggcccgatgggggtggctacagcaggctttggcctagtgcagccccggcctcccctcgagcccagccccactggccgccaccgtggggtacgtgctgtgcagcagcagctggcctacgccagggccacaggccatgccatggctgccatgccgtccagtcaggaaacagcagaggctgtgcccaagggagcgatgggcaacatggggtcggtgcctccccagccgcctccgcaggacgcaggtggggccccggaccacagcatgctctactactacggccagatccacatgtacgaacaggatggaggcctggagaacctcgggagctgccaggtcatgcggtcccagccaccacagccacaggcctgtcaggacagcatccagccccagcccttgccctcaccaggggtcaaccaggtgtccagcactgtggactcccagctcctggaggccccccagattgacttcgatgccatcatggatgatggcgatcactcgagtttgttctcgggtgctctgagccccagcctcctccacagcctctcccagaactcctcccgcctcaccaccccccgaaactccttgaccctgccctccatccccgcaggcatcagcaacatggctgtcggggacatgagctccatgctcaccagcctcgccgaggagagcaagttcctgaacatgatgacctagaggcccgagcgcctggtgctgagtgcacccggaggggtcatcgctgcccagagcctggggattccagctgtcttgtctttttccaaaaaagtgttaaataggcttgaggggttgttgcgcaatggccgcttcagatgacagatgttgtaagagaaggtttatgggcatcctctctggtcttttggattattcctcagaacaatgaaaaaagtctccataggacaggaaggaatgcaaaactcatttacacagtgctttccagcctttggtgcttacaggaccgcgctgttccggcttcttcacggctgacattcggctaacgagggattactttggccaaaacctttcaaaggatatgcagaaagatggtagggagcatttgggtttgaatctgaatgctatactggatactctgctccggaaagatgagctttttattctactacttggaaggaaaaggaattcctggtccacctgaattcctctatgaagcctaactcttgaggtctctaacataccttgtcatagaggaaaagcacagattatacctggatgattcaggagcacattctgattccaggtttggtagagctggctcttctactccgtaaagccgagtctgggactggcagcccatccaagtgtatatgaatgaataaagcatccaagtatatatgaatgaataaagtatgtaagtatcaccagaaaaaggaaagaaaaaatgtactccttggggcaagcccagaagctgccctggcctctccagaccgtgtttacagtgtttgcatgtagaatgtagcccttcctgaaaagaagacttgtttctaaatacctcggggctgctggagccgctgtgggttagggatggactgaggcctcgaggagtgagggtgcacccggggcccagcctcaggctgccctagggatctctcagtaggaagaggaagttgcgtgtttacccaatcctgtttctccaatgcaacgtccacccactttaccaccaaaaactccagggcctgacggcagcccggtcccccagcactcaccagcagcccagtgttctccaccaagccacagtgtgcatgcctggtatcctccggattcccttccttctgcccgctgagtcactgggcagagaatgatgacatgtgtaggtggtgtggttgggggtggaaaggggaaggggttgatcctcaggactctgagggagcatcgttgaattttcctgttcagtgtgaccaagacccacctggaaatggaatttggaactggcttcaggagacatcattcctgaacacactgtagggtgaattggtgcatcttccccaccatacacacacacacacacacacacacacacacacacacacacacaccccaaaccttttcatggggaatgtgtggcaaccttgccaaacagcaccactcagagtgtgactctgactgtgaccttggccttaatgaggaacttcttaggagagtttgaggacaaggccaacatcgtcatctgggctcgctgcgtcccagcacatcaaactctgtccagagacaaggccaactgcaaatgaaagccagggaacattgctaagggtctgtggctctgtggtggtgttcatcgccttcctgagataggatttcccttgccagtcccaacctgtatatattctgtacagaagacatccctgaatatactgtaggtgagtcgtccagccaaatttatatctccaaaacatttttagctttttctacatgctatgaattgagatgacatgctcaacttgtaaataagtctttttgtacattaaaaaagtaattttttcataatttatcttgtctatctgcttcccccttgacagtagttaatgagaacctgggcagtaaatttggtgcattcgagcagaaattaggctgtattttttcttaacagtgtcaaaattgactatcccgcctttgccaagaaatgtttaatgctgaggcatttactggctgtttgtttgttgtctccttggggccgggcagggtttgacatttcacagtgaatatctgactgctcttccggtgagccactctgaacatctatatgcattgcagaccggggtatagacccaaacactcctagggtcagaaccctccctttggtgggccctctgatggagcatatttcatcagggtggggcggggtgagatgggcaaacccccaaggctctggtgcaggtagaaggagtcagggcaggcaggtggcacctccaggatgcccagcagttggccttggcaaaggggcccatggggagcaaccacgagcaggggctctgagctctagggggccgcccagcaggtggacagggaaagcctgggtccagtgggcagacagtcagctgttggcccctacagtaaacctcagggagcccttgaatgagtcatgaggccccatctgggggtagggccagagacggagcagggagcagagccccaggactgaactagaggggaagagggcactttctaagggccaggcacccgggcctctgaacaccgagcccagagccctttaccctctcctctccaggagagaagccttagcacgcaggctgggcagtgtggacaccaaagacacatgggacatcatctttgcctggaaggcatgagacacatggaccggggaagggttttgtggtcagacacttgcaggaaacccccaaggagaatagaattgagcagatttcctttccgcaggcatcccacagcctccactgtgcatcagggagccaccacttctctggccaacatttcctagtggaaaggcccctctcctccccaaggagcaatgtcactcggcgagctcccagggaggaagtaagcatgcacagctctgcccttccctcctcttctttccaaagcccaccttcggggctcacaccttctctgcttcaccacttgttaagcctctggaagcagctctgccctactttgtggagagggtgaggcctaatgttgttcagtgccacctgaggttgcacgagccacagaattaagagcccactgtggccattcagacgagccatctcctctgtgtcaggtaacgatggccacagtcacgctgcataacaacatccatgaaacctcagcaccgtataacaataagcatgtagttagctcatgaacctgaaggtctgaaggttggctgccccgggtcgggcttgcctgggctgtctccaactgtggctcagctggggtcatctagtctaggtggcttggcctcccccagtgtgacacatcttcctcccaggaccaagacactagcaatgacagaagcacaggagggcaagccagcagctgcaggtccccaaagcaagtcacgtggccagcacccatgcagtagggaagggtactcctgcggaagtgagcaggagagagcaaatatttcccgacagtaatccagtctaccacagcctgccttcctagagacagttattcatgttccacatgcagaatatacccaatcaacacccccagaaaaaaagaaaaaactctccagtcagacttcctcaggcttaaagtccaggatcttgtggtctatatctgggtgtggttcttcttgacccagagtcttaccagctaaaaagacaagttttctgcccgtcgcaccctgctcatacacccaacatacagtggtggaccagggctagaataacactaatgagcactcccatctagaaagggagacggaggcacacagcagtccctggttcaggcatctgaagtcctgccgggcaaatgttgcaacgcccctgctctggaggtggggtgctccgagcggcccccaggccatcgtgcgccacagttctagcttccaccgctggggccttcttccttttccatcgtcctttcaacttctgatgaggatgttggaaaacagtccctttggtagcagagtaactttcagcttcttcctgcctgtgggaagttgggaacctaaggttctttaggttcaaacagtctcagtttccttgagtcctgggcgatgcctttgcccagagcgatctctcaagcatctcaggagttttctatgtatttgactccagcccactgtgtgtcagaagccacacccaaattcctttggcaatatgcctctctacgtctgacaatgtgtacccccacatcaggctgctgtaggccacaccttgatagtttgtaggcaccctgttgttactaaaaggatatgcttgatgtcaccttattccttgcaaggacctgatgacaaagggcattaccattaagggtacatccctgatgtcatctcaactctgaggcatgcttcaccaacgtagctctggatctggtctttgcctcccaggccagatattagattggtgcaaaaataattacttttatgccacaattattttgcaccaacctaatattaatttgaggaccttttactggctggagagcccggagatgggaagtgattttgttttctaaattctgcttgtacactggctagttcctttccgaactcgtctcttacttgtagaaccttatcatttgcagctcgaaaagctcatgtttacaatattctgcctggaaaccgtcctgcccaactccactaactcataggtccattttctccctcccaaagtatcataggcaataactttaccagatgtctctccaccacataacacaggtcaccatctttcttgccagttttcccagccgcctctgtatttcctcactgcccagttccaaacctctgctacatactttaggagcagcagcctccgattctaggtaccaatttcagaataagttaactgcagtccagtagtgctgtctaataaaaatgcttacaggctgagcgcagtggctcactttgggtggctgaggcaggcgaatcagaaggtcaggagttcaagagcagcctggccaatatggtgaaaccctgtctttactaaaaatacagaaattagctgggtgtggtggcacacgcctgtagtcccaggtactccggtggctgaggcagaagaatcgcttgaactcaggaggcggaggttgcagtgagtcgagatcgcaccactgtactccagcctgggcgacaaagcgagacttcgaaaaaaaaatgcttacaacaggaggcatctgttcagctcctaagtctgcgagttagctgaggtggacttagcgaggctgggcttgctggagcagctcagctctgctcctgtgccactcctctccctgggaccagaggattgttcggacatctagcagtgacggcagaaggacaaacgggcaagaaataacacaggagcctctttgggcctaggctaggaaccgaaagcaaagcatatggctgagccccaggtcagtagaactaagaagctcacttctatacagtgaggggagacaggtatccgagcaacaatccagaccaggcatagtggcacaggcctgtaatcccagcactttggaaggccaaaggattgcttgagctcaagagttcaagatcagcctgggcaaaatggtgaaaccctgtctttacaaaaagaaaacagctgggcatggtggcatgcacctgcagtcacagctacttgggaggctgaggtgggagcattacctgagcccagggatgtggggactgcagtgagctgtgacggcaccactgcgattctagcctgggcaacagggtgagaccctgtctcaaaaaaacaaacaaacaaacatctaacctaccacatcctcaatccagcttttttaacagtaagaccaacattgcaacctccatctgtctgctgagtctgtattttagttggttctaaacccagaagaagccaggtgtagtggtatgtgcctctagtcccagctactggggaggctgaggcaggaggattgcttgagcccaggagttcgtggctgcagtgattggaccactgtcctccagcctgggcaacagagtaagaccccagttctataaaataaaaaataaatacaaccagaaaaggataacagtaggggggttcctttttcttcttctttcttcttctttctccttctccttcttctttcttcttcttcgtcctctttctcctcttcctcttctcctccttctcctccttcccctccccctccttcccctcctccttctccttttcctcctccttctccttcttttgcttcttcttattctcttcttgttgttgttcttatttctttttctctctctctctctctgtttctcgtaggagggagtgagcaactaacggggaagggatgaaagataagaatgatttgaataagaaaaaatatctggctgggaggaggaggaggatcaggaaaaataactgaagggtactaggcttaattgggtgattaaataatctgtacaacaaacccccatgacacaagtttacctatgtaacaaacaagcacttgtacccttgaatttaaaataaaagttaaaaaaagaaaaaagatctgatttagattttgaaagattaataggagttcatctgaggggactggagatttctcatcagaaaccatgaaagccaggagtaagtgaaatatttttaaagtgctgaaagaaaagaactgtcaacccagaactcgttattcatgaaaatatccttggtaaaatagatactgtgagataaatggacattctcagataaaggaaaactatgagggttcattgcccatagacctgccctagaaggcagaagggaagtgatcccagaaggaaacgtggagcatcaggactggaggaagagcagcggaagtggtaagtgtttgcaggaatacagtagactactcctgcctcctgggttctttaaaatacgttcaacagttaagaggaaaaaagtacaacattgtttgatggagttttccatgtatgtaggtgtcacaaagacaagtattacataagtggagagggttaaggacctgtatggggttctagaactacattccacttgaagtgggcaagtattcatctgcagactgtgcaaagttatatatattctaatccctagtgcaatcagaaaaagaccaaacaaactatacaaaaggatgtaggcaaaaccacaatagagacatcaaaatggaatactaaaagcatgttcaaataacccaaaagagggcaaaaaagagtaacaggaataataacaacaaaaagaagcaacagagaaaacaaagaatgaaatggttgacctaaatccaaacatataaataattacataaaatgaaaacggcctaaaagcctcaattaaaagacacaataaagcactcacacaacctgcttttaagatgtactgtaaagctggcatcatcaagacagggtggtattggtgatgggaagacacagctcaatggaacagagcagagcagggtcatgcactgtagcccaaaggcaaaatctggctgatatggtttggctgtgtccccacccaaatcccatcttcaattgtagtttccacagtccccacatgttgtggtagggacccggtggttcccatagagctaatataaaatataaaaccaaaacattttatggtaattgaatcataggaatggttatccccatgccgttcccatgatagtgagtgagttcttacaagatctgatgtttttataagggacttttccccctttgcttggcacttctctctcctgctgccttgtgaagaaggaagtgcctgcttccccttccgccatgagtgtaagtttcctgaggcatccccagccatgccgaactgtgtatcaattaaacctctttcctttataaattacccagtctagggtatctcttcatagtagcatgggaatagactaatacacactggccatggtctctttttgtatgaccaatgagctaataatggtttttacatttttaaagggtttttttaaataataaaagcatatgaagcagagatcatatggcccacaaagcctaaaacatttactattttacccttcacagaaaacatttgccaacccttggaatagagagtccagaaatagacccacaaaatataacaatggattttgaacaaaagtgccaaggcaattcaataggaaaagaattaaaacatatgatgttgaaacaactggatatccataggcagaaaaaaataatgaaccttgacctaaacctcacacctcacaaaaattgcctcaaaatagaccatacagctaatataaaatataaaaccacaacatttttagaagcaaccatagcagaaaaagtctttatgccctgaggttagacaaaaagtttttatacatgacaccaaaaaacatggtccataaaaggagaaatttgggaaattggatttcataacatttaaaaatatgttctctgaaagagacaggagaatgaaaacacaagctacagactgggagaaaatattatttcatcacacatccaatgaaggacttgtatccagactatataaagaactctcacaatcaatggtaagaaaacaaaccagcttaaaaatggggaaaaaaacttggacagatgcttcactaaagaggatatatggaggcacatgagcacaggaaaggctgctcaccatccttagccactagggcaatacgaatttaagcacagttagattcagccaccaggcatctgcgtggcagcaactcttccctacactgtgaagataaatcttcacttccttacagagctccaggcctggcctatgagaactgacaaggggccttgaaccccactgtcctcatctgtgatataggtttgataaattgcccatcccaaaaagctttcaaggatgaaatgagacaaaatatgtaatattcctcagccttagtgggtgttcaacaagcttcccctctttgtgccaagagacatcatcatcacagaaatattcctttggctaatagatttggagcagaaatacccctggaaaagattaccctcagtcccaccactgcaagaactcatttcatcagtaacttcattcctaaaaattggtctgaaggtatttttgaggcccagtaactttgcaacatgtcaacttggctgagctgatccatgcttctcagaattcctgctcctgggtgtttccgttaggttggattacaagagagattcttgcgggagacttggtgggtgggggcagagggatgcagcaggcatttcacagcccatttgtggagtcgattacctgcgggctctgcccatctttgtggggcagccatctgggcctccaccttccctggctcctccttccgctgccccacctccataggccaggtgtgtatgtttagtgccatggtgggggccttggcttcagaaagacattcataccaccaaggccagaagcaacaagcactgacagctctcagtctgtcctcgtgggctccagcttgtccttgctcccccagtctataggtatcttctcttcctgaccacctgcctgtgggctttgagttccagcatcagacacagcaaaaaggccttacagagactgcttgaccagccctcatgactgtgaaaggccaggtccttgcagcagatccatttctctatctatctatctatctatctatctatctatctatctatctatctatccatccatctgtctacctatctacctgcccacctatctatctacctattatctagctagctagtatgatctctgtatcatctatctatctatctatctatctatctatctatcatatctatgatttctttgtctgacatctatctatccatccatccattcatccatccatccatccatccatctatccatcacagtggtcctgtgtccctgcttaagctgtggctgataacatgaccatggaaggaaggcagctctgcaggtctggcaaggatgtcaagggccagcctggtgacctgccgcagctactgtggacagggagctaccctcagtgtttgctctgtcccaagcactataccatacacgttacttctcttgggcaggttatattgctgcaataatgtggagaaaaagcatcccaaaactcacaggcttaaagcaatgatcatttgttctcactgctccatgggtttcccaagaatgggctgacctatgccaggccaggctcaatggcccagctccacattttggagtccagactgaagagtcaccagtgacctcagggagagtcttctcgtggtgatggcagaagtttaagaggacataggaattttccagaccccctaaggcctaggttcagaactggtccactgctacttccgtccctttctcttgaccaaagcaagtgacatggccagacccaaagtcacagaggcaaggaatttcatcctacccttaaggaggcaaggccagggcatggactccaggcaaggtgatgaacagggaccaatgattgtgtctaccactcacagtgtttatttactctgtggcaggcactgtgatagacagtttacattaatggagttctgcaatcctcacgacaaccctacacaataggtaggaactatattatctctagttaggttaacttgtccaagattactttgccactgagtggcagatggggatttagactcaggacttctaacccctgtgccctcacctcactgtgttgagagtggtgagcaaaacgaggcttgtcgacaataagggaaagtggcattaagcaaataaaggagaactgcagttctcagggccatgaaggctca

SEQ ID NO: 1058 - DNA, 3649 bp, Homo sapiens
tgaagttcgtggactcctacaataatgctataaatgcatagaagaaaagacacaggactgtgaaagaaagtgatgatgcgatgtctaaaacgttcaaggcaccgcatctgtgatcaagaatacatgtgctgctttaccgacacatcaaagagcaaggattgccacccaggacgatgagcggctgagatggagacgtctgcctcagccactgcctccgagaagcaagaagccaaaagtgggatcctggaggccgctggcttccccgacccgggtaaaaaggcctctcctttggtggtggctgcagcggcagcagcagcggtagctgcccaaggagcccagccttcaccttcccccaccccatcaaccccgtggcctaccagcagattctgagccagcagaggggtctggggtcagcctttggacacacaccacccctgatccagccctcacccaccttcctggcccagcagcccatggccctcacctccatcaatgccacgcccacccagctcagcagcagcagcaactgtctgagtgacaccaaccagaacaagcagagcagtgagtcggccgtcagcagcaccgtcaaccctgtcgccattcacaagcgcagcaaggtcaagaccgagcctgagggcctgcggccggcctcccctctggcgctgacgcagggccaggtgtctggacacggctcatgtgggtgtgcccttcccctctcccaggagcagctggctgacctcaaggaagatctggacagggatgactgtaagcaggaggctgaggtggtcatctatgagaccaactgccactgggaagactgcaccaaggagtacgacacccaggagcagctggtgcatcacatcaacaacgagcacatccacggggagaagaaggagtttgtgtgccgctggcaggcctgcacgcgggagcagaagcccttcaaggcgcagtacatgctggtggtgcacatgcggcgacacacgggcgagaagccccacaagtgcacgttcgagggctgctcgaaggcctactcccgcctggagaacctgaagacacacctgcggtcccacaccggggagaagccatatgtgtgtgagcacgagggctgcaacaaagccttctccaacgcctcggaccgcgccaagcaccagaatcgcacccactccaacgagaaaccctacatctgcaagatcccaggctgcaccaagagatacacagaccccagctctctccggaagcatgtgaaaacggtccacggcccagatgcccacgtcaccaagaagcagcgcaatgacgtgcacctccgcacaccgctgctcaaagagaatggggacagtgaggccggcacggagcctggcggcccagagagcaccgaggccagcagcaccagccaggccgtggaggactgcctgcacgtcagagccatcaagactgagagctccgggctgtgtcagtccagccccggggcccagtcgtcctgcagcagcgagccctctcctctgggcagtgcccccaacaatgacagtggcgtggagatgccggggacggggcccgggagcctgggagacctgacggcactggatgacacacccccaggggccgacacctcagccctggctgccccctccgctggtggcctccagctgcgcaaacacatgaccaccatgcaccggttcgagcagctcaagaaggagaagctcaagtcactcaaggattcctgctcatgggccgggccgactccacacacgcggaacaccaagctgcctcccctcccgggaagtggctccatcctggaaaacttcagtggcagtgggggcggcgggcccgcggggctgctgccgaacccgcggctgtcggagctgtccgcgagcgaggtgaccatgctgagccagctgcaggagcgccgcgacagctccaccagcacggtcagctcggcctacaccgtgagccgccgctcctccggcatctccccctacttctccagccgccgctccagcgaggcctcgcccctgggcgccggccgcccgcacaacgcgagctccgctgactcctacgaccccatctccacggacgcgtcgcggcgctcgagcgaggccagccagtgcagcggcggctccgggctgctcaacctcacgccggcgcagcagtacagcctgcgggccaagtacgcggcagccactggcggccccccgcccactccgctgccgggcctggagcgcatgagcctgcggaccaggctggcgctgctggacgcgcccgagcgcacgctgcccgccggctgcccacgcccactggggccgcggcgtggcagcgacgggccgacctatggccacggccacgcgggggctgcgcccgccttcccccacgaggctccaggcggcggagccaggcgggccagcgaccctgtgcggcggcccgatgccctgtccctgccgcgggtgcagcgcttccacagcacccacaacgtgaaccccggcccgctgccgccctgtgccgacaggcgaggcctccgcctgcagagccacccgagcaccgacggcggcctggcccgcggcgcctactcgccccggccgcctagcatcagcgagaacgtggcgatggaggccgtggcggcaggagtggacggcgcggggcccgaggccgacctggggctgccggaggacgacctggtgcttccagacgacgtggtgcagtacatcaaggcgcacgccagtggcgctctggacgagggcaccgggcaggtgtatcccacggaaagcactggcttctctgacaaccccagactacccagcccggggctgcacggccagcgcaggatggtggctgcggactccaacgtgggcccctccgcccctatgctgggaggatgccagttaggctttggggcgccctccagcctgaacaaaaataacatgcctgtgcagtggaatgaggcatcagcaacatggctgtcggggacatgagctccatgctcaccagcctcgccgaggagagcaagttcctgaacatgatgacctagaggcccgagcgcctggtgctgagtgcacccggaggggtcatcgctgcccagagcctggggattccagctgtcttgtctttttccaaaaaagtgttaaataggcttgaggggttgttgcgcaatggccgcttcagatgacagatgttgtaagagaaggtttatgggcatcctctctggtcttttggattattcctcagaacaatgaaaaaagtctccataggacaggaaggaatgcaaaactcatttacacagtgctttccagcctttggtgcttacaggaccgcgctgttccggcttcttcacggctgacattcggctaacgagggattactttggccaaaacctttcaaaggatatgcagaaagatggtagggagcatttgggtttgaatctgaatgctatactggatactctgctccggaaagatgagctttttattctactacttggaaggaaaaggaattcctggtccacctgaattcctctatgaagcctaactcttgaggtctctaacataccttgtcatagaggaaaagcacagattatacctggatgattcaggagcactgtatatgaatgaataaagcatccaagtatatatgaatgaataaagtatgtaagtatcaccag

SEQ ID NO: 1059 - protein, 817 aa, Homo sapiens
MALTSINATPTQLSSSSNCLSDTNQNKQSSESAVSSTVNPVAIHKRSKVKTEPEGLRPDLALTQGQVSGHGSCGCALPLSQEQLADLKEDLDRDDCKQEAEVVIYETNCHWEDCTKEYDTQEQLVHHINNEHIHGEKKEFVCRWQACTREQKPFKAQYMLVVHMRRHTGEKPHKCTFEGCSKAYSRLENLKTHLRSHTGEKPYVCEHEGCNKAFSNASDRAKHQNRTHSNEKPYICKIPGCTKRYTDPSSLRKHVKTVHGPDAHVTKKQRNDVHLRTPLLKENGDSEAGTEPGGPESTEASSTSQAVEDCLHVRAIKTESSGLCQSSPGAQSSCSSEPSPLGSAPNNDSGVEMPGTGPGSLGDLTALDDTPPGADTSAAPSAGGLQLRKHMTTMHRFEQLKKEKLKSLKDSCSWAGPTPHTRNTKLPPLPGSGSINFSGSGGGGPAGLLPNPRLSELSASEVTMLSQLQERRDSSTSTVSSAYTVSRRSSGISPYFSSRRSSEDLGAGRPHNASSADSYDPISTDASRRSSEASQCSGGSGLLNLTPAQQYSLRAKYAAATGGPPPTPLPGLERMSLRTRLALLDAPERTLPAGCPRPLGPRRGSDGPTYGHGHAGAAPAFFAPGGGARRASDPVRRPDALSLPRVQRFHSTHNVNPGPLPPCADRRGLRLQSHPSTDGGLRAYSPRPPSISENVAMEAVAAGVDGAGPEADLGLPEDDLVLPDDVVQYIKAHASGALDEGTGQVYPTESTGFSDNPRLPSPGLHGQRRMVAADSNVGPSAPMLGGCQLGFGAPSSLNKNNMPVQWNEASATWLSGT

SEQ ID NO: 1060 - DNA, 3298 bp, Homo sapiens
cccagccttcaccttcccccaccccatcaaccccgtggcctaccagcagattctgagccagcagaggggtctggggtcagcctttggacacacaccacccctgatccagccctcacccaccttcctggcccagcagcccatggccctcacctccatcaatgccacgcccacccagctcagcagcagcagcaactgtctgagtgacaccaaccagaacaagcagagcagtgagtcggccgtcagcagcaccgtcaaccctgtcgccattcacaagcgcagcaaggtcaagaccgagcctgagggcctgcggccggcctcccctctggcgctgacgcagggccaggtgtctggacacggctcatgtgggtgtgcccttcccctctcccaggagcagctggctgacctcaaggaagatctggacagggatgactgtaagcaggaggctgaggtggtcatctatgagaccaactgccactgggaagactgcaccaaggagtacgacacccaggagcagctggtgcatcacatcaacaacgagcacatccacggggagaagaaggagtttgtgtgccgctggcaggcctgcacgcgggagcagaagcccttcaaggcgcagtacatgctggtggtgcacatgcggcgacacacgggcgagaagccccacaagtgcacgttcgagggctgctcgaaggcctactcccgcctggagaacctgaagacacacctgcggtcccacaccggggagaagccatatgtgtgtgagcacgagggctgcaacaaagccttctccaacgcctcggaccgcgccaagcaccagaatcgcacccactccaacgagaaaccctacatctgcaagatcccaggctgcaccaagagatacacagaccccagctctctccggaagcatgtgaaaacggtccacggcccagatgcccacgtcaccaagaagcagcgcaatgacgtgcacctccgcacaccgctgctcaaagagaatggggacagtgaggccggcacggagcctggcggcccagagagcaccgaggccagcagcaccagccaggccgtggaggactgcctgcacgtcagagccatcaagactgagagctccgggctgtgtcagtccagccccggggcccagtcgtcctgcagcagcgagccctctcctctgggcagtgcccccaacaatgacagtggcgtggagatgccggggacggggcccgggagcctgggagacctgacggcactggatgacacacccccaggggccgacacctcagccctggctgccccctccgctggtggcctccagctgcgcaaacacatgaccaccatgcaccggttcgagcagctcaagaaggagaagctcaagtcactcaaggattcctgctcatgggccgggccgactccacacacgcggaacaccaagctgcctcccctcccgggaagtggctccatcctggaaaacttcagtggcagtgggggcggcgggcccgcggggctgctgccgaacccgcggctgtcggagctgtccgcgagcgaggtgaccatgctgagccagctgcaggagcgccgcgacagctccaccagcacggtcagctcggcctacaccgtgagccgccgctcctccggcatctccccctacttctccagccgccgctccagcgaggcctcgcccctgggcgccggccgcccgcacaacgcgagctccgctgactcctacgaccccatctccacggacgcgtcgcggcgctcgagcgaggccagccagtgcagcggcggctccgggctgctcaacctcacgccggcgcagcagtacagcctgcgggccaagtacgcggcagccactggcggccccccgcccactccgctgccgggcctggagcgcatgagcctgcggaccaggctggcgctgctggacgcgcccgagcgcacgctgcccgccggctgcccacgcccactggggccgcggcgtggcagcgacgggccgacctatggccacggccacgcgggggctgcgcccgccttcccccacgaggctccaggcggcggagccaggcgggccagcgaccctgtgcggcggcccgatgccctgtccctgccgcgggtgcagcgcttccacagcacccacaacgtgaaccccggcccgctgccgccctgtgccgacaggcgaggcctccgcctgcagagccacccgagcaccgacggcggcctggcccgcggcgcctactcgccccggccgcctagcatcagcgagaacgtggcgatggaggccgtggcggcaggagtggacggcgcggggcccgaggccgacctggggctgccggaggacgacctggtgcttccagacgacgtggtgcagtacatcaaggcgcacgccagtggcgctctggacgagggcaccgggcaggtgtatcccacggaaagcactggcttctctgacaaccccagactacccagcccggggctgcacggccagcgcaggatggtggctgcggactccaacgtgggcccctccgcccctatgctgggaggatgccagttaggctttggggcgccctccagcctgaacaaaaataacatgcctgtgcagtggaatgaggcatcagcaacatggctgtcggggacatgagctccatgctcaccagcctcgccgaggagagcaagttcctgaacatgatgacctagaggcccgagcgcctggtgctgagtgcacccggaggggtcatcgctgcccagagcctggggattccagctgtcttgtctttttccaaaaaagtgttaaataggcttgaggggttgttgcgcaatggccgcttcagatgacagatgttgtaagagaaggtttatgggcatcctctctggtcttttggattattcctcagaacaatgaaaaaagtctccataggacaggaaggaatgcaaaactcatttacacagtgctttccagcctttggtgcttacaggaccgcgctgttccggcttcttcacggctgacattcggctaacgagggattactttggccaaaacctttcaaaggatatgcagaaagatggtagggagcatttgggtttgaatctgaatgctatactggatactctgctccggaaagatgagctttttattctactacttggaaggaaaaggaattcctctatgaagcctaactcttgaggtctctaacataccttgtcatagaggaaaagcacagattatacctggatgattcaggagcactgtatatgaatgaataaagcatccaagtatatatgaatgaataaagtatgtaagtatcaccag

SEQ ID NO: 1061 - protein, 817 aa, Homo sapiens; identical to SEQ ID NO: 1059

SEQ ID NO: 1062 - DNA, 4812 bp, Homo sapiens
tgaagttcgtggactcctacaataatgctataaatgcatagaagaaaagacacaggactgtgaaagaaagtgatgatgcgatgtctaaaacgttcaaggcaccgcatctgtgatcaagaatacatgtgctgctttaccgacacatcaaagagcaaggattgccacccaggacgatgagcggctgagatggagacgtctgcctcagccactgcctccgagaagcaagaagccaaaagtgggatcctggaggccgctggcttccccgacccgggtaaaaaggcctctcctttggtggtggctgcagcggcagcagcagcggtagctgcccaaggagcccagccttcaccttcccccaccccatcaaccccgtggcctaccagcagattctgagccagcagaggggtctggggtcagcctttggacacacaccacccctgatccagccctcacccaccttcctggcccagcagcccatggccctcacctccatcaatgccacgcccacccagctcagcagcagcagcaactgtctgagtgacaccaaccagaacaagcagagcagtgagtcggccgtcagcagcaccgtcaaccctgtcgccattcacaagcgcagcaaggtcaagaccgagcctgagggcctgcggccggcctcccctctggcgctgacgcaggagcagctggctgacctcaaggaagatctggacagggatgactgtaagcaggaggctgaggtggtcatctatgagaccaactgccactgggaagactgcaccaaggagtacgacacccaggagcagctggtgcatcacatcaacaacgagcacatccacggggagaagaaggagtttgtgtgccgctggcaggcctgcacgcgggagcagaagcccttcaaggcgcagtacatgctggtggtgcacatgcggcgacacacgggcgagaagccccacaagtgcacgttcgagggctgctcgaaggcctactcccgcctggagaacctgaagacacacctgcggtcccacaccggggagaagccatatgtgtgtgagcacgagggctgcaacaaagccttctccaacgcctcggaccgcgccaagcaccagaatcgcacccactccaacgagaaaccctacatctgcaagatcccaggctgcaccaagagatacacagaccccagctctctccggaagcatgtgaaaacggtccacggcccagatgcccacgtcaccaagaagcagcgcaatgacgtgcacctccgcacaccgctgctcaaagagaatggggacagtgaggccggcacggagcctggcggcccagagagcaccgaggccagcagcaccagccaggccgtggaggactgcctgcacgtcagagccatcaagactgagagctccgggctgtgtcagtccagccccggggcccagtcgtcctgcagcagcgagccctctcctctgggcagtgcccccaacaatgacagtggcgtggagatgccggggacggggcccgggagcctgggagacctgacggcactggatgacacacccccaggggccgacacctcagccctggctgccccctccgctggtggcctccagctgcgcaaacacatgaccaccatgcaccggttcgagcagctcaagaaggagaagctcaagtcactcaaggattcctgctcatgggccgggccgactccacacacgcggaacaccaagctgcctcccctcccgggaagtggctccatcctggaaaacttcagtggcagtgggggcggcgggcccgcggggctgctgccgaacccgcggctgtcggagctgtccgcgagcgaggtgaccatgctgagccagctgcaggagcgccgcgacagctccaccagcacggtcagctcggcctacaccgtgagccgccgctcctccggcatctccccctacttctccagccgccgctccagcgaggcctcgcccctgggcgccggccgcccgcacaacgcgagctccgctgactcctacgaccccatctccacggacgcgtcgcggcgctcgagcgaggccagccagtgcagcggcggctccgggctgctcaacctcacgccggcgcagcagtacagcctgcgggccaagtacgcggcagccactggcggccccccgcccactccgctgccgggcctggagcgcatgagcctgcggaccaggctggcgctgctggacgcgcccgagcgcacgctgcccgccggctgcccacgcccactggggccgcggcgtggcagcgacgggccgacctatggccacggccacgcgggggctgcgcccgccttcccccacgaggctccaggcggcggagccaggcgggccagcgaccctgtgcggcggcccgatgccctgtccctgccgcgggtgcagcgcttccacagcacccacaacgtgaaccccggcccgctgccgccctgtgccgacaggcgaggcctccgcctgcagagccacccgagcaccgacggcggcctggcccgcggcgcctactcgccccggccgcctagcatcagcgagaacgtggcgatggaggccgtggcggcaggagtggacggcgcggggcccgaggccgacctggggctgccggaggacgacctggtgcttccagacgacgtggtgcagtacatcaaggcgcacgccagtggcgctctggacgagggcaccgggcaggtgtatcccacggaaagcactggcttctctgacaaccccagactacccagcccggggctgcacggccagcgcaggatggtggctgcggactccaacgtgggcccctccgcccctatgctgggaggatgccagttaggctttggggcgccctccagcctgaacaaaaataacatgcctgtgcagtggaatgaggtgagctccggcaccgtagactccctggccagccaggtgaagcctccaccctttcctcagggcaacctggcggtggtgcagcagaagcctgcctttggccagtacccgggctacagtccgcaaggcctacaggctagccctgggggcctggacagcacgcagccacacctgcagccccgcagcggagccccctcccagggcatccccagggtaaactacatgcagcagctgcgacagccagtggcaggcagccagtgtcctggcatgactaccactatgagcccccatgcctgctatggccaagtccacccccagctgagccccagcaccatcagtggggccctcaaccagttcccccaatcctgcagcaacatgccagccaagccagggcatctggggcaccctcagcagacagaagtggcacctgaccccaccacgatgggcaatcgccacagggaacttggggtccccgattcagccctggctggagtgccaccacctcacccagtccagagctacccacagcagagccatcacctggcagcctccatgagccaggagggctaccaccaggtccccagccttctgcctgcccgccagcctggcttcatggagccccaaacaggcccgatgggggtggctacagcaggctttggcctagtgcagccccggcctcccctcgagcccagccccactggccgccaccgtggggtacgtgctgtgcagcagcagctggcctacgccagggccacaggccatgccatggctgccatgccgtccagtcaggaaacagcagaggctgtgcccaagggagcgatgggcaacatggggtcggtgcctccccagccgcctccgcaggacgcaggtggggccccggaccacagcatgctctactactacggccagatccacatgtacgaacaggatggaggcctggagaacctcgggagctgccaggtcatgcggtcccagccaccacagccacaggcctgtcaggacagcatccagccccagcccttgccctcaccaggggtcaaccaggtgtccagcactgtggactcccagctcctggaggccccccagattgacttcgatgccatcatggatgatggcgatcactcgagtttgttctcgggtgctctgagccccagcctcctccacagcctctcccagaactcctcccgcctcaccaccccccgaaactccttgaccctgccctccatccccgcaggcatcagcaacatggctgtcggggacatgagctccatgctcaccagcctcgccgaggagagcaagttcctgaacatgatgacctagaggcccgagcgcctggtgctgagtgcacccggaggggtcatcgctgcccagagcctggggattccagctgtcttgtctttttccaaaaaagtgttaaataggcttgaggggttgttgcgcaatggccgcttcagatgacagatgttgtaagagaaggtttatgggcatcctctctggtcttttggattattcctcagaacaatgaaaaaagtctccataggacaggaaggaatgcaaaactcatttacacagtgctttccagcctttggtgcttacaggaccgcgctgttccggcttcttcacggctgacattcggctaacgagggattactttggccaaaacctttcaaaggatatgcagaaagatggtagggagcatttgggtttgaatctgaatgctatactggatactctgctccggaaagatgagctttttattctactacttggaaggaaaaggaattcctctatgaagcctaactcttgaggtctctaacataccttgtcatagaggaaaagcacagattatacctggatgattcaggagcactgtatatgaatgaataaagcatccaagtatatatgaatgaataaagtatgtaagtatcaccag

SEQ ID NO: 1063 - protein, 1225 aa, Homo sapiens
MALTSINATPTQLSSSSNCLSDTNQNKQSSESAVSSTVNPVAIHKRSKVKTEPEGLRPDLALTQEQLADLKEDLDRDDCKQEAEVVIYETNCHWEDCTKEYDTQEQLVHHINNEHIHGEKKEFVCRWQACTREQKPFKAQYMLVVHMRRHTGEKPHKCTFEGCSKAYSRLENLKTHLRSHTGEKPYVCEHEGCNKAFSNASDRAKHQNRTHSNEKPYICKIPGCTKRYTDPSSLRKHVKTVHGPDAHVTKKQRNDVHLRTPLLKENGDSEAGTEPGGPESTEASSTSQAVEDCLHVRAIKTESSGLCQSSPGAQSSCSSEPSPLGSAPNNDSGVEMPGTGPGSLGDLTALDDTPPGADTSAAPSAGGLQLRKHMTTMHRFEQLKKEKLKSLKDSCSWAGPTPHTRNTKLPPLPGSGSINFSGSGGGGPAGLLPNPRLSELSASEVTMLSQLQERRDSSTSTVSSAYTVSRRSSGISPYFSSRRSSEDLGAGRPHNASSADSYDPISTDASRRSSEASQCSGGSGLLNLTPAQQYSLRAKYAAATGGPPPTPLPGLERMSLRTRLALLDAPERTLPAGCPRPLGPRRGSDGPTYGHGHAGAAPAFFAPGGGARRASDPVRRPDALSLPRVQRFHSTHNVNPGPLPPCADRRGLRLQSHPSTDGGLRAYSPRPPSISENVAMEAVAAGVDGAGPEADLGLPEDDLVLPDDVVQYIKAHASGALDEGTGQVYPTESTGFSDNPRLPSPGLHGQRRMVAADSNVGPSAPMLGGCQLGFGAPSSLNKNNMPVQWNEVSSGTVDSLASQVKPPPFPQGNLAVVQQKPAFGQYPGYSPQGLQDGGLDSTQPHLQPRSGAPSQGIPRVNYMQQLRQPVAGSQCPGMTTTMSPHACYGQVHPQLSPSTISGALNQFPQSCSNMPAKPGHLGHPQQTEVAPDPTTMGNRHRELGVPDSAGVPPPHPVQSYPQQSHHLAASMSQEGYHQVPSLLPARQPGFMEPQTGPMGVATAGFGLVQPRPPLEPSPTGRHRGVRAVQQQLAYARATGHAMAAMPSSQETAEAVPKGAMGNMGSVPPQPPPQDAGGAPDHSMLYYYGQIHMYEQDGGLENLGSCQVMRSQPPQPQACQDSIQPQPLPSPGVNQVSSTVDSQLLEAPQIDFDAIMDDGDHSSLFSGALSPSLLHSLSQNSSRLTTPRNSLTLPSIPAGISNMAVGDMSSMLTSLAEESKFLNMMT

SEQ ID NO: 1064 - DNA, 4529 bp, Homo sapiens
cccagccttcaccttcccccaccccatcaaccccgtggcctaccagcagattctgagccagcagaggggtctggggtcagcctttggacacacaccacccctgatccagccctcacccaccttcctggcccagcagcccatggccctcacctccatcaatgccacgcccacccagctcagcagcagcagcaactgtctgagtgacaccaaccagaacaagcagagcagtgagtcggccgtcagcagcaccgtcaaccctgtcgccattcacaagcgcagcaaggtcaagaccgagcctgagggcctgcggccggcctcccctctggcgctgacgcagggccaggtgtctggacacggctcatgtgggtgtgcccttcccctctcccaggagcagctggctgacctcaaggaagatctggacagggatgactgtaagcaggaggctgaggtggtcatctatgagaccaactgccactgggaagactgcaccaaggagtacgacacccaggagcagctggtgcatcacatcaacaacgagcacatccacggggagaagaaggagtttgtgtgccgctggcaggcctgcacgcgggagcagaagcccttcaaggcgcagtacatgctggtggtgcacatgcggcgacacacgggcgagaagccccacaagtgcacgttcgagggctgctcgaaggcctactcccgcctggagaacctgaagacacacctgcggtcccacaccggggagaagccatatgtgtgtgagcacgagggctgcaacaaagccttctccaacgcctcggaccgcgccaagcaccagaatcgcacccactccaacgagaaaccctacatctgcaagatcccaggctgcaccaagagatacacagaccccagctctctccggaagcatgtgaaaacggtccacggcccagatgcccacgtcaccaagaagcagcgcaatgacgtgcacctccgcacaccgctgctcaaagagaatggggacagtgaggccggcacggagcctggcggcccagagagcaccgaggccagcagcaccagccaggccgtggaggactgcctgcacgtcagagccatcaagactgagagctccgggctgtgtcagtccagccccggggcccagtcgtcctgcagcagcgagccctctcctctgggcagtgcccccaacaatgacagtggcgtggagatgccggggacggggcccgggagcctgggagacctgacggcactggatgacacacccccaggggccgacacctcagccctggctgccccctccgctggtggcctccagctgcgcaaacacatgaccaccatgcaccggttcgagcagctcaagaaggagaagctcaagtcactcaaggattcctgctcatgggccgggccgactccacacacgcggaacaccaagctgcctcccctcccgggaagtggctccatcctggaaaacttcagtggcagtgggggcggcgggcccgcggggctgctgccgaacccgcggctgtcggagctgtccgcgagcgaggtgaccatgctgagccagctgcaggagcgccgcgacagctccaccagcacggtcagctcggcctacaccgtgagccgccgctcctccggcatctccccctacttctccagccgccgctccagcgaggcctcgcccctgggcgccggccgcccgcacaacgcgagctccgctgactcctacgaccccatctccacggacgcgtcgcggcgctcgagcgaggccagccagtgcagcggcggctccgggctgctcaacctcacgccggcgcagcagtacagcctgcgggccaagtacgcggcagccactggcggccccccgcccactccgctgccgggcctggagcgcatgagcctgcggaccaggctggcgctgctggacgcgcccgagcgcacgctgcccgccggctgcccacgcccactggggccgcggcgtggcagcgacgggccgacctatggccacggccacgcgggggctgcgcccgccttcccccacgaggctccaggcggcggagccaggcgggccagcgaccctgtgcggcggcccgatgccctgtccctgccgcgggtgcagcgcttccacagcacccacaacgtgaaccccggcccgctgccgccctgtgccgacaggcgaggcctccgcctgcagagccacccgagcaccgacggcggcctggcccgcggcgcctactcgccccggccgcctagcatcagcgagaacgtggcgatggaggccgtggcggcaggagtggacggcgcggggcccgaggccgacctggggctgccggaggacgacctggtgcttccagacgacgtggtgcagtacatcaaggcgcacgccagtggcgctctggacgagggcaccgggcaggtgtatcccacggaaagcactggcttctctgacaaccccagactacccagcccggggctgcacggccagcgcaggatggtggctgcggactccaacgtgggcccctccgcccctatgctgggaggatgccagttaggctttggggcgccctccagcctgaacaaaaataacatgcctgtgcagtggaatgaggtgagctccggcaccgtagactccctggccagccaggtgaagcctccaccctttcctcagggcaacctggcggtggtgcagcagaagcctgcctttggccagtacccgggctacagtccgcaaggcctacaggctagccctgggggcctggacagcacgcagccacacctgcagccccgcagcggagccccctcccagggcatccccagggtaaactacatgcagcagctgcgacagccagtggcaggcagccagtgtcctggcatgactaccactatgagcccccatgcctgctatggccaagtccacccccagctgagccccagcaccatcagtggggccctcaaccagttcccccaatcctgcagcaacatgccagccaagccagggcatctggggcaccctcagcagacagaagtggcacctgaccccaccacgatgggcaatcgccacagggaacttggggtccccgattcagccctggctggagtgccaccacctcacccagtccagagctacccacagcagagccatcacctggcagcctccatgagccaggagggctaccaccaggtccccagccttctgcctgcccgccagcctggcttcatggagccccaaacaggcccgatgggggtggctacagcaggctttggcctagtgcagccccggcctcccctcgagcccagccccactggccgccaccgtggggtacgtgctgtgcagcagcagctggcctacgccagggccacaggccatgccatggctgccatgccgtccagtcaggaaacagcagaggctgtgcccaagggagcgatgggcaacatggggtcggtgcctccccagccgcctccgcaggacgcaggtggggccccggaccacagcatgctctactactacggccagatccacatgtacgaacaggatggaggcctggagaacctcgggagctgccaggtcatgcggtcccagccaccacagccacaggcctgtcaggacagcatccagccccagcccttgccctcaccaggggtcaaccaggtgtccagcactgtggactcccagctcctggaggccccccagattgacttcgatgccatcatggatgatggcgatcactcgagtttgttctcgggtgctctgagccccagcctcctccacagcctctcccagaactcctcccgcctcaccaccccccgaaactccttgaccctgccctccatccccgcaggcatcagcaacatggctgtcggggacatgagctccatgctcaccagcctcgccgaggagagcaagttcctgaacatgatgacctagaggcccgagcgcctggtgctgagtgcacccggaggggtcatcgctgcccagagcctggggattccagctgtcttgtctttttccaaaaaagtgttaaataggcttgaggggttgttgcgcaatggccgcttcagatgacagatgttgtaagagaaggtttatgggcatcctctctggtcttttggattattcctcagaacaatgaaaaaagtctccataggacaggaaggaatgcaaaactcatttacacagtgctttccagcctttggtgcttacaggaccgcgctgttccggcttcttcacggctgacattcggctaacgagggattactttggccaaaacctttcaaaggatatgcagaaagatggtagggagcatttgggtttgaatctgaatgctatactggatactctgctccggaaagatgagctttttattctactacttggaaggaaaaggaattcctctatgaagcctaactcttgaggtctctaacataccttgtcatagaggaaaagcacagattatacctggatgattcaggagcactgtatatgaatgaataaagcatccaagtatatatgaatgaataaagtatgtaagtatcaccag

SEQ ID NO: 1065 - protein, 1242 aa, Homo sapiens
MALTSINATPTQLSSSSNCLSDTNQNKQSSESAVSSTVNPVAIHKRSKVKTEPEGLRPDLALTQGQVSGHGSCGCALPLSQEQLADLKEDLDRDDCKQEAEVVIYETNCHWEDCTKEYDTQEQLVHHINNEHIHGEKKEFVCRWQACTREQKPFKAQYMLVVHMRRHTGEKPHKCTFEGCSKAYSRLENLKTHLRSHTGEKPYVCEHEGCNKAFSNASDRAKHQNRTHSNEKPYICKIPGCTKRYTDPSSLRKHVKTVHGPDAHVTKKQRNDVHLRTPLLKENGDSEAGTEPGGPESTEASSTSQAVEDCLHVRAIKTESSGLCQSSPGAQSSCSSEPSPLGSAPNNDSGVEMPGTGPGSLGDLTALDDTPPGADTSAAPSAGGLQLRKHMTTMHRFEQLKKEKLKSLKDSCSWAGPTPHTRNTKLPPLPGSGSINFSGSGGGGPAGLLPNPRLSELSASEVTMLSQLQERRDSSTSTVSSAYTVSRRSSGISPYFSSRRSSEDLGAGRPHNASSADSYDPISTDASRRSSEASQCSGGSGLLNLTPAQQYSLRAKYAAATGGPPPTPLPGLERMSLRTRLALLDAPERTLPAGCPRPLGPRRGSDGPTYGHGHAGAAPAFFAPGGGARRASDPVRRPDALSLPRVQRFHSTHNVNPGPLPPCADRRGLRLQSHPSTDGGLRAYSPRPPSISENVAMEAVAAGVDGAGPEADLGLPEDDLVLPDDVVQYIKAHASGALDEGTGQVYPTESTGFSDNPRLPSPGLHGQRRMVAADSNVGPSAPMLGGCQLGFGAPSSLNKNNMPVQWNEVSSGTVDSLASQVKPPPFPQGNLAVVQQKPAFGQYPGYSPQGLQDGGLDSTQPHLQPRSGAPSQGIPRVNYMQQLRQPVAGSQCPGMTTTMSPHACYGQVHPQLSPSTISGALNQFPQSCSNMPAKPGHLGHPQQTEVAPDPTTMGNRHRELGVPDSAGVPPPHPVQSYPQQSHHLAASMSQEGYHQVPSLLPARQPGFMEPQTGPMGVATAGFGLVQPRPPLEPSPTGRHRGVRAVQQQLAYARATGHAMAAMPSSQETAEAVPKGAMGNMGSVPPQPPPQDAGGAPDHSMLYYYGQIHMYEQDGGLENLGSCQVMRSQPPQPQACQDSIQPQPLPSPGVNQVSSTVDSQLLEAPQIDFDAIMDDGDHSSLFSGALSPSLLHSLSQNSSRLTTPRNSLTLPSIPAGISNMAVGDMSSMLTSLAEESKFLNMMT

SEQ ID NO: 1066 - DNA, 3581 bp, Homo sapiens
tgaagttcgtggactcctacaataatgctataaatgcatagaagaaaagacacaggactgtgaaagaaagtgatgatgcgatgtctaaaacgttcaaggcaccgcatctgtgatcaagaatacatgtgctgctttaccgacacatcaaagagcaaggattgccacccaggacgatgagcggctgagatggagacgtctgcctcagccactgcctccgagaagcaagaagccaaaagtgggatcctggaggccgctggcttccccgacccgggtaaaaaggcctctcctttggtggtggctgcagcggcagcagcagcggtagctgcccaaggagcccagccttcaccttcccccaccccatcaaccccgtggcctaccagcagattctgagccagcagaggggtctggggtcagcctttggacacacaccacccctgatccagccctcacccaccttcctggcccagcagcccatggccctcacctccatcaatgccacgcccacccagctcagcagcagcagcaactgtctgagtgacaccaaccagaacaagcagagcagtgagtcggccgtcagcagcaccgtcaaccctgtcgccattcacaagcgcagcaaggtcaagaccgagcctgagggcctgcggccggcctcccctctggcgctgacgcaggagcagctggctgacctcaaggaagatctggacagggatgactgtaagcaggaggctgaggtggtcatctatgagaccaactgccactgggaagactgcaccaaggagtacgacacccaggagcagctggtgcatcacatcaacaacgagcacatccacggggagaagaaggagtttgtgtgccgctggcaggcctgcacgcgggagcagaagcccttcaaggcgcagtacatgctggtggtgcacatgcggcgacacacgggcgagaagccccacaagtgcacgttcgagggctgctcgaaggcctactcccgcctggagaacctgaagacacacctgcggtcccacaccggggagaagccatatgtgtgtgagcacgagggctgcaacaaagccttctccaacgcctcggaccgcgccaagcaccagaatcgcacccactccaacgagaaaccctacatctgcaagatcccaggctgcaccaagagatacacagaccccagctctctccggaagcatgtgaaaacggtccacggcccagatgcccacgtcaccaagaagcagcgcaatgacgtgcacctccgcacaccgctgctcaaagagaatggggacagtgaggccggcacggagcctggcggcccagagagcaccgaggccagcagcaccagccaggccgtggaggactgcctgcacgtcagagccatcaagactgagagctccgggctgtgtcagtccagccccggggcccagtcgtcctgcagcagcgagccctctcctctgggcagtgcccccaacaatgacagtggcgtggagatgccggggacggggcccgggagcctgggagacctgacggcactggatgacacacccccaggggccgacacctcagccctggctgccccctccgctggtggcctccagctgcgcaaacacatgaccaccatgcaccggttcgagcagctcaagaaggagaagctcaagtcactcaaggattcctgctcatgggccgggccgactccacacacgcggaacaccaagctgcctcccctcccgggaagtggctccatcctggaaaacttcagtggcagtgggggcggcgggcccgcggggctgctgccgaacccgcggctgtcggagctgtccgcgagcgaggtgaccatgctgagccagctgcaggagcgccgcgacagctccaccagcacggtcagctcggcctacaccgtgagccgccgctcctccggcatctccccctacttctccagccgccgctccagcgaggcctcgcccctgggcgccggccgcccgcacaacgcgagctccgctgactcctacgaccccatctccacggacgcgtcgcggcgctcgagcgaggccagccagtgcagcggcggctccgggctgctcaacctcacgccggcgcagcagtacagcctgcgggccaagtacgcggcagccactggcggccccccgcccactccgctgccgggcctggagcgcatgagcctgcggaccaggctggcgctgctggacgcgcccgagcgcacgctgcccgccggctgcccacgcccactggggccgcggcgtggcagcgacgggccgacctatggccacggccacgcgggggctgcgcccgccttcccccacgaggctccaggcggcggagccaggcgggccagcgaccctgtgcggcggcccgatgccctgtccctgccgcgggtgcagcgcttccacagcacccacaacgtgaaccccggcccgctgccgccctgtgccgacaggcgaggcctccgcctgcagagccacccgagcaccgacggcggcctggcccgcggcgcctactcgccccggccgcctagcatcagcgagaacgtggcgatggaggccgtggcggcaggagtggacggcgcggggcccgaggccgacctggggctgccggaggacgacctggtgcttccagacgacgtggtgcagtacatcaaggcgcacgccagtggcgctctggacgagggcaccgggcaggtgtatcccacggaaagcactggcttctctgacaaccccagactacccagcccggggctgcacggccagcgcaggatggtggctgcggactccaacgtgggcccctccgcccctatgctgggaggatgccagttaggctttggggcgccctccagcctgaacaaaaataacatgcctgtgcagtggaatgaggcatcagcaacatggctgtcggggacatgagctccatgctcaccagcctcgccgaggagagcaagttcctgaacatgatgacctagaggcccgagcgcctggtgctgagtgcacccggaggggtcatcgctgcccagagcctggggattccagctgtcttgtctttttccaaaaaagtgttaaataggcttgaggggttgttgcgcaatggccgcttcagatgacagatgttgtaagagaaggtttatgggcatcctctctggtcttttggattattcctcagaacaatgaaaaaagtctccataggacaggaaggaatgcaaaactcatttacacagtgctttccagcctttggtgcttacaggaccgcgctgttccggcttcttcacggctgacattcggctaacgagggattactttggccaaaacctttcaaaggatatgcagaaagatggtagggagcatttgggtttgaatctgaatgctatactggatactctgctccggaaagatgagctttttattctactacttggaaggaaaaggaattcctctatgaagcctaactcttgaggtctctaacataccttgtcatagaggaaaagcacagattatacctggatgattcaggagcactgtatatgaatgaataaagcatccaagtatatatgaatgaataaagtatgtaagtatcaccag

SEQ ID NO: 1067 - protein, 800 aa, Homo sapiens
MALTSINATPTQLSSSSNCLSDTNQNKQSSESAVSSTVNPVAIHKRSKVKTEPEGLRPDLALTQEQLADLKEDLDRDDCKQEAEVVIYETNCHWEDCTKEYDTQEQLVHHINNEHIHGEKKEFVCRWQACTREQKPFKAQYMLVVHMRRHTGEKPHKCTFEGCSKAYSRLENLKTHLRSHTGEKPYVCEHEGCNKAFSNASDRAKHQNRTHSNEKPYICKIPGCTKRYTDPSSLRKHVKTVHGPDAHVTKKQRNDVHLRTPLLKENGDSEAGTEPGGPESTEASSTSQAVEDCLHVRAIKTESSGLCQSSPGAQSSCSSEPSPLGSAPNNDSGVEMPGTGPGSLGDLTALDDTPPGADTSAAPSAGGLQLRKHMTTMHRFEQLKKEKLKSLKDSCSWAGPTPHTRNTKLPPLPGSGSINFSGSGGGGPAGLLPNPRLSELSASEVTMLSQLQERRDSSTSTVSSAYTVSRRSSGISPYFSSRRSSEDLGAGRPHNASSADSYDPISTDASRRSSEASQCSGGSGLLNLTPAQQYSLRAKYAAATGGPPPTPLPGLERMSLRTRLALLDAPERTLPAGCPRPLGPRRGSDGPTYGHGHAGAAPAFFAPGGGARRASDPVRRPDALSLPRVQRFHSTHNVNPGPLPPCADRRGLRLQSHPSTDGGLRAYSPRPPSISENVAMEAVAAGVDGAGPEADLGLPEDDLVLPDDVVQYIKAHASGALDEGTGQVYPTESTGFSDNPRLPSPGLHGQRRMVAADSNVGPSAPMLGGCQLGFGAPSSLNKNNMPVQWNEASATWLSGT

SEQ ID NO: 1068 - DNA, 3247 bp, Homo sapiens
cccagccttcaccttcccccaccccatcaaccccgtggcctaccagcagattctgagccagcagaggggtctggggtcagcctttggacacacaccacccctgatccagccctcacccaccttcctggcccagcagcccatggccctcacctccatcaatgccacgcccacccagctcagcagcagcagcaactgtctgagtgacaccaaccagaacaagcagagcagtgagtcggccgtcagcagcaccgtcaaccctgtcgccattcacaagcgcagcaaggtcaagaccgagcctgagggcctgcggccggcctcccctctggcgctgacgcaggagcagctggctgacctcaaggaagatctggacagggatgactgtaagcaggaggctgaggtggtcatctatgagaccaactgccactgggaagactgcaccaaggagtacgacacccaggagcagctggtgcatcacatcaacaacgagcacatccacggggagaagaaggagtttgtgtgccgctggcaggcctgcacgcgggagcagaagcccttcaaggcgcagtacatgctggtggtgcacatgcggcgacacacgggcgagaagccccacaagtgcacgttcgagggctgctcgaaggcctactcccgcctggagaacctgaagacacacctgcggtcccacaccggggagaagccatatgtgtgtgagcacgagggctgcaacaaagccttctccaacgcctcggaccgcgccaagcaccagaatcgcacccactccaacgagaaaccctacatctgcaagatcccaggctgcaccaagagatacacagaccccagctctctccggaagcatgtgaaaacggtccacggcccagatgcccacgtcaccaagaagcagcgcaatgacgtgcacctccgcacaccgctgctcaaagagaatggggacagtgaggccggcacggagcctggcggcccagagagcaccgaggccagcagcaccagccaggccgtggaggactgcctgcacgtcagagccatcaagactgagagctccgggctgtgtcagtccagccccggggcccagtcgtcctgcagcagcgagccctctcctctgggcagtgcccccaacaatgacagtggcgtggagatgccggggacggggcccgggagcctgggagacctgacggcactggatgacacacccccaggggccgacacctcagccctggctgccccctccgctggtggcctccagctgcgcaaacacatgaccaccatgcaccggttcgagcagctcaagaaggagaagctcaagtcactcaaggattcctgctcatgggccgggccgactccacacacgcggaacaccaagctgcctcccctcccgggaagtggctccatcctggaaaacttcagtggcagtgggggcggcgggcccgcggggctgctgccgaacccgcggctgtcggagctgtccgcgagcgaggtgaccatgctgagccagctgcaggagcgccgcgacagctccaccagcacggtcagctcggcctacaccgtgagccgccgctcctccggcatctccccctacttctccagccgccgctccagcgaggcctcgcccctgggcgccggccgcccgcacaacgcgagctccgctgactcctacgaccccatctccacggacgcgtcgcggcgctcgagcgaggccagccagtgcagcggcggctccgggctgctcaacctcacgccggcgcagcagtacagcctgcgggccaagtacgcggcagccactggcggccccccgcccactccgctgccgggcctggagcgcatgagcctgcggaccaggctggcgctgctggacgcgcccgagcgcacgctgcccgccggctgcccacgcccactggggccgcggcgtggcagcgacgggccgacctatggccacggccacgcgggggctgcgcccgccttcccccacgaggctccaggcggcggagccaggcgggccagcgaccctgtgcggcggcccgatgccctgtccctgccgcgggtgcagcgcttccacagcacccacaacgtgaaccccggcccgctgccgccctgtgccgacaggcgaggcctccgcctgcagagccacccgagcaccgacggcggcctggcccgcggcgcctactcgccccggccgcctagcatcagcgagaacgtggcgatggaggccgtggcggcaggagtggacggcgcggggcccgaggccgacctggggctgccggaggacgacctggtgcttccagacgacgtggtgcagtacatcaaggcgcacgccagtggcgctctggacgagggcaccgggcaggtgtatcccacggaaagcactggcttctctgacaaccccagactacccagcccggggctgcacggccagcgcaggatggtggctgcggactccaacgtgggcccctccgcccctatgctgggaggatgccagttaggctttggggcgccctccagcctgaacaaaaataacatgcctgtgcagtggaatgaggcatcagcaacatggctgtcggggacatgagctccatgctcaccagcctcgccgaggagagcaagttcctgaacatgatgacctagaggcccgagcgcctggtgctgagtgcacccggaggggtcatcgctgcccagagcctggggattccagctgtcttgtctttttccaaaaaagtgttaaataggcttgaggggttgttgcgcaatggccgcttcagatgacagatgttgtaagagaaggtttatgggcatcctctctggtcttttggattattcctcagaacaatgaaaaaagtctccataggacaggaaggaatgcaaaactcatttacacagtgctttccagcctttggtgcttacaggaccgcgctgttccggcttcttcacggctgacattcggctaacgagggattactttggccaaaacctttcaaaggatatgcagaaagatggtagggagcatttgggtttgaatctgaatgctatactggatactctgctccggaaagatgagctttttattctactacttggaaggaaaaggaattcctctatgaagcctaactcttgaggtctctaacataccttgtcatagaggaaaagcacagattatacctggatgattcaggagcactgtatatgaatgaataaagcatccaagtatatatgaatgaataaagtatgtaagtatcaccag

SEQ ID NO: 1069 - protein, 800 aa, Homo sapiens; identical to SEQ ID NO: 1067

SEQ ID NO: 1070 - DNA, 3632 bp, Homo sapiens
tgaagttcgtggactcctacaataatgctataaatgcatagaagaaaagacacaggactgtgaaagaaagtgatgatgcgatgtctaaaacgttcaaggcaccgcatctgtgatcaagaatacatgtgctgctttaccgacacatcaaagagcaaggattgccacccaggacgatgagcggctgagatggagacgtctgcctcagccactgcctccgagaagcaagaagccaaaagtgggatcctggaggccgctggcttccccgacccgggtaaaaaggcctctcctttggtggtggctgcagcggcagcagcagcggtagctgcccaaggagcccagccttcaccttcccccaccccatcaaccccgtggcctaccagcagattctgagccagcagaggggtctggggtcagcctttggacacacaccacccctgatccagccctcacccaccttcctggcccagcagcccatggccctcacctccatcaatgccacgcccacccagctcagcagcagcagcaactgtctgagtgacaccaaccagaacaagcagagcagtgagtcggccgtcagcagcaccgtcaaccctgtcgccattcacaagcgcagcaaggtcaagaccgagcctgagggcctgcggccggcctcccctctggcgctgacgcagggccaggtgtctggacacggctcatgtgggtgtgcccttcccctctcccaggagcagctggctgacctcaaggaagatctggacagggatgactgtaagcaggaggctgaggtggtcatctatgagaccaactgccactgggaagactgcaccaaggagtacgacacccaggagcagctggtgcatcacatcaacaacgagcacatccacggggagaagaaggagtttgtgtgccgctggcaggcctgcacgcgggagcagaagcccttcaaggcgcagtacatgctggtggtgcacatgcggcgacacacgggcgagaagccccacaagtgcacgttcgagggctgctcgaaggcctactcccgcctggagaacctgaagacacacctgcggtcccacaccggggagaagccatatgtgtgtgagcacgagggctgcaacaaagccttctccaacgcctcggaccgcgccaagcaccagaatcgcacccactccaacgagaaaccctacatctgcaagatcccaggctgcaccaagagatacacagaccccagctctctccggaagcatgtgaaaacggtccacggcccagatgcccacgtcaccaagaagcagcgcaatgacgtgcacctccgcacaccgctgctcaaagagaatggggacagtgaggccggcacggagcctggcggcccagagagcaccgaggccagcagcaccagccaggccgtggaggactgcctgcacgtcagagccatcaagactgagagctccgggctgtgtcagtccagccccggggcccagtcgtcctgcagcagcgagccctctcctctgggcagtgcccccaacaatgacagtggcgtggagatgccggggacggggcccgggagcctgggagacctgacggcactggatgacacacccccaggggccgacacctcagccctggctgccccctccgctggtggcctccagctgcgcaaacacatgaccaccatgcaccggttcgagcagctcaagaaggagaagctcaagtcactcaaggattcctgctcatgggccgggccgactccacacacgcggaacaccaagctgcctcccctcccgggaagtggctccatcctggaaaacttcagtggcagtgggggcggcgggcccgcggggctgctgccgaacccgcggctgtcggagctgtccgcgagcgaggtgaccatgctgagccagctgcaggagcgccgcgacagctccaccagcacggtcagctcggcctacaccgtgagccgccgctcctccggcatctccccctacttctccagccgccgctccagcgaggcctcgcccctgggcgccggccgcccgcacaacgcgagctccgctgactcctacgaccccatctccacggacgcgtcgcggcgctcgagcgaggccagccagtgcagcggcggctccgggctgctcaacctcacgccggcgcagcagtacagcctgcgggccaagtacgcggcagccactggcggccccccgcccactccgctgccgggcctggagcgcatgagcctgcggaccaggctggcgctgctggacgcgcccgagcgcacgctgcccgccggctgcccacgcccactggggccgcggcgtggcagcgacgggccgacctatggccacggccacgcgggggctgcgcccgccttcccccacgaggctccaggcggcggagccaggcgggccagcgaccctgtgcggcggcccgatgccctgtccctgccgcgggtgcagcgcttccacagcacccacaacgtgaaccccggcccgctgccgccctgtgccgacaggcgaggcctccgcctgcagagccacccgagcaccgacggcggcctggcccgcggcgcctactcgccccggccgcctagcatcagcgagaacgtggcgatggaggccgtggcggcaggagtggacggcgcggggcccgaggccgacctggggctgccggaggacgacctggtgcttccagacgacgtggtgcagtacatcaaggcgcacgccagtggcgctctggacgagggcaccgggcaggtgtatcccacggaaagcactggcttctctgacaaccccagactacccagcccggggctgcacggccagcgcaggatggtggctgcggactccaacgtgggcccctccgcccctatgctgggaggatgccagttaggctttggggcgccctccagcctgaacaaaaataacatgcctgtgcagtggaatgaggcatcagcaacatggctgtcggggacatgagctccatgctcaccagcctcgccgaggagagcaagttcctgaacatgatgacctagaggcccgagcgcctggtgctgagtgcacccggaggggtcatcgctgcccagagcctggggattccagctgtcttgtctttttccaaaaaagtgttaaataggcttgaggggttgttgcgcaatggccgcttcagatgacagatgttgtaagagaaggtttatgggcatcctctctggtcttttggattattcctcagaacaatgaaaaaagtctccataggacaggaaggaatgcaaaactcatttacacagtgctttccagcctttggtgcttacaggaccgcgctgttccggcttcttcacggctgacattcggctaacgagggattactttggccaaaacctttcaaaggatatgcagaaagatggtagggagcatttgggtttgaatctgaatgctatactggatactctgctccggaaagatgagctttttattctactacttggaaggaaaaggaattcctctatgaagcctaactcttgaggtctctaacataccttgtcatagaggaaaagcacagattatacctggatgattcaggagcactgtatatgaatgaataaagcatccaagtatatatgaatgaataaagtatgtaagtatcaccag

SEQ ID NO: 1071 - protein, 817 aa, Homo sapiens; identical to SEQ ID NO: 1059

SEQ ID NO: 1072 - DNA, 4863 bp, Homo sapiens
tgaagttcgtggactcctacaataatgctataaatgcatagaagaaaagacacaggactgtgaaagaaagtgatgatgcgatgtctaaaacgttcaaggcaccgcatctgtgatcaagaatacatgtgctgctttaccgacacatcaaagagcaaggattgccacccaggacgatgagcggctgagatggagacgtctgcctcagccactgcctccgagaagcaagaagccaaaagtgggatcctggaggccgctggcttccccgacccgggtaaaaaggcctctcctttggtggtggctgcagcggcagcagcagcggtagctgcccaaggagcccagccttcaccttcccccaccccatcaaccccgtggcctaccagcagattctgagccagcagaggggtctggggtcagcctttggacacacaccacccctgatccagccctcacccaccttcctggcccagcagcccatggccctcacctccatcaatgccacgcccacccagctcagcagcagcagcaactgtctgagtgacaccaaccagaacaagcagagcagtgagtcggccgtcagcagcaccgtcaaccctgtcgccattcacaagcgcagcaaggtcaagaccgagcctgagggcctgcggccggcctcccctctggcgctgacgcagggccaggtgtctggacacggctcatgtgggtgtgcccttcccctctcccaggagcagctggctgacctcaaggaagatctggacagggatgactgtaagcaggaggctgaggtggtcatctatgagaccaactgccactgggaagactgcaccaaggagtacgacacccaggagcagctggtgcatcacatcaacaacgagcacatccacggggagaagaaggagtttgtgtgccgctggcaggcctgcacgcgggagcagaagcccttcaaggcgcagtacatgctggtggtgcacatgcggcgacacacgggcgagaagccccacaagtgcacgttcgagggctgctcgaaggcctactcccgcctggagaacctgaagacacacctgcggtcccacaccggggagaagccatatgtgtgtgagcacgagggctgcaacaaagccttctccaacgcctcggaccgcgccaagcaccagaatcgcacccactccaacgagaaaccctacatctgcaagatcccaggctgcaccaagagatacacagaccccagctctctccggaagcatgtgaaaacggtccacggcccagatgcccacgtcaccaagaagcagcgcaatgacgtgcacctccgcacaccgctgctcaaagagaatggggacagtgaggccggcacggagcctggcggcccagagagcaccgaggccagcagcaccagccaggccgtggaggactgcctgcacgtcagagccatcaagactgagagctccgggctgtgtcagtccagccccggggcccagtcgtcctgcagcagcgagccctctcctctgggcagtgcccccaacaatgacagtggcgtggagatgccggggacggggcccgggagcctgggagacctgacggcactggatgacacacccccaggggccgacacctcagccctggctgccccctccgctggtggcctccagctgcgcaaacacatgaccaccatgcaccggttcgagcagctcaagaaggagaagctcaagtcactcaaggattcctgctcatgggccgggccgactccacacacgcggaacaccaagctgcctcccctcccgggaagtggctccatcctggaaaacttcagtggcagtgggggcggcgggcccgcggggctgctgccgaacccgcggctgtcggagctgtccgcgagcgaggtgaccatgctgagccagctgcaggagcgccgcgacagctccaccagcacggtcagctcggcctacaccgtgagccgccgctcctccggcatctccccctacttctccagccgccgctccagcgaggcctcgcccctgggcgccggccgcccgcacaacgcgagctccgctgactcctacgaccccatctccacggacgcgtcgcggcgctcgagcgaggccagccagtgcagcggcggctccgggctgctcaacctcacgccggcgcagcagtacagcctgcgggccaagtacgcggcagccactggcggccccccgcccactccgctgccgggcctggagcgcatgagcctgcggaccaggctggcgctgctggacgcgcccgagcgcacgctgcccgccggctgcccacgcccactggggccgcggcgtggcagcgacgggccgacctatggccacggccacgcgggggctgcgcccgccttcccccacgaggctccaggcggcggagccaggcgggccagcgaccctgtgcggcggcccgatgccctgtccctgccgcgggtgcagcgcttccacagcacccacaacgtgaaccccggcccgctgccgccctgtgccgacaggcgaggcctccgcctgcagagccacccgagcaccgacggcggcctggcccgcggcgcctactcgccccggccgcctagcatcagcgagaacgtggcgatggaggccgtggcggcaggagtggacggcgcggggcccgaggccgacctggggctgccggaggacgacctggtgcttccagacgacgtggtgcagtacatcaaggcgcacgccagtggcgctctggacgagggcaccgggcaggtgtatcccacggaaagcactggcttctctgacaaccccagactacccagcccggggctgcacggccagcgcaggatggtggctgcggactccaacgtgggcccctccgcccctatgctgggaggatgccagttaggctttggggcgccctccagcctgaacaaaaataacatgcctgtgcagtggaatgaggtgagctccggcaccgtagactccctggccagccaggtgaagcctccaccctttcctcagggcaacctggcggtggtgcagcagaagcctgcctttggccagtacccgggctacagtccgcaaggcctacaggctagccctgggggcctggacagcacgcagccacacctgcagccccgcagcggagccccctcccagggcatccccagggtaaactacatgcagcagctgcgacagccagtggcaggcagccagtgtcctggcatgactaccactatgagcccccatgcctgctatggccaagtccacccccagctgagccccagcaccatcagtggggccctcaaccagttcccccaatcctgcagcaacatgccagccaagccagggcatctggggcaccctcagcagacagaagtggcacctgaccccaccacgatgggcaatcgccacagggaacttggggtccccgattcagccctggctggagtgccaccacctcacccagtccagagctacccacagcagagccatcacctggcagcctccatgagccaggagggctaccaccaggtccccagccttctgcctgcccgccagcctggcttcatggagccccaaacaggcccgatgggggtggctacagcaggctttggcctagtgcagccccggcctcccctcgagcccagccccactggccgccaccgtggggtacgtgctgtgcagcagcagctggcctacgccagggccacaggccatgccatggctgccatgccgtccagtcaggaaacagcagaggctgtgcccaagggagcgatgggcaacatggggtcggtgcctccccagccgcctccgcaggacgcaggtggggccccggaccacagcatgctctactactacggccagatccacatgtacgaacaggatggaggcctggagaacctcgggagctgccaggtcatgcggtcccagccaccacagccacaggcctgtcaggacagcatccagccccagcccttgccctcaccaggggtcaaccaggtgtccagcactgtggactcccagctcctggaggccccccagattgacttcgatgccatcatggatgatggcgatcactcgagtttgttctcgggtgctctgagccccagcctcctccacagcctctcccagaactcctcccgcctcaccaccccccgaaactccttgaccctgccctccatccccgcaggcatcagcaacatggctgtcggggacatgagctccatgctcaccagcctcgccgaggagagcaagttcctgaacatgatgacctagaggcccgagcgcctggtgctgagtgcacccggaggggtcatcgctgcccagagcctggggattccagctgtcttgtctttttccaaaaaagtgttaaataggcttgaggggttgttgcgcaatggccgcttcagatgacagatgttgtaagagaaggtttatgggcatcctctctggtcttttggattattcctcagaacaatgaaaaaagtctccataggacaggaaggaatgcaaaactcatttacacagtgctttccagcctttggtgcttacaggaccgcgctgttccggcttcttcacggctgacattcggctaacgagggattactttggccaaaacctttcaaaggatatgcagaaagatggtagggagcatttgggtttgaatctgaatgctatactggatactctgctccggaaagatgagctttttattctactacttggaaggaaaaggaattcctctatgaagcctaactcttgaggtctctaacataccttgtcatagaggaaaagcacagattatacctggatgattcaggagcactgtatatgaatgaataaagcatccaagtatatatgaatgaataaagtatgtaagtatcaccag

SEQ ID NO: 1073 - protein, 1242 aa, Homo sapiens; identical to SEQ ID NO: 1065

SEQ ID NO: 1074 - DNA, 288120 bp, Mus musculus
  misc_feature (1)...(288120): n = A, C, G or T/U
ttcaacacccttagacattaggggaaatgagagttacaactattttgagagtctgccttacctagtcagaatggctgttcgcaaaaggtcaaatgacaggggatgcttgcaaggttgtagggaaaaagaagtcttatttactgttcgtgggagtctagtttagtataggtgctatagaaaacagtctgaaggctggaaagagaactaccacatgatccaaatatcctgggtatatctaaaggactctagactttagacatgctcattcatgttcactgctactctactcataactcatttccaggaaatggaaacactctagatgctcatcaactgatgaatggataatgaaaatgtggtatgcatctacaacataatttattaatttatctgttataaaaacaagatcacaaaatttgcaggtaaatggatgaaactgggaaaagttatagctaactaggtcatctaggtacagaacggtaaatactgcatgttctctcacccatgaatctttagatattcatgttttatttggagtacctatagaaaccaggaagctagaaaagggtcaggggcagggtgtgggcaggcttaagaggaggggctttaaaatgtaattgagagtgaaagcataaaatcataagcaaaattcaattgtttcagaattgtaattgtgcagaagttcactagttggggacaggaacaagtgtttgtgtggcttctttaaatcagtggtgtggttttgtttgtttgtttgtttgtttgtgagttaatcagaaaaaagcaaatttaattaactaatttcaaatagaggtggaaagctagtagaacattgatgaggtgaaaatagagggaggggacacttggagtgggtgagaaaggtttaagcagagatagagtgaggagatacagcagatgaagggtcagagaagagaattaaccaacatgaagggtgcttgagaaatcgatatagaaacacgctatttgtaagccaactgaaaaaaaaaaagatgtaagttttaaaaagttaaagacttagaagtgggcatattgtatggctgcatagtactgttcctagagagccgttgttaattaaactaaatcctaatgctagatatgtgatacctccttatgagctgttgatcggagaagccctagatgtcaccgaaacaataaggctcttttaaaaaggatttttgagagaaaatctggctatgtagctacctctggcctggaacttgctatgttgatcacagcaagttctgtctgcctctacctacttcctgaatactagatcaaggatgcacatcagcatacctggctgcagtacagactcttgccattcttcttgggtgctcatcaaatctaggtgataagacctgcctgcagaagataccatacactttgcttgcacagtctagagaaatcaaactagagtaagctggaagtttcttccatggtggctcactttcaaagtaagtgacatgctatgcagttttcggcggaggaggtgataagtcactgctgctattatgcaactgtgaatcctatgcactacagtgctaatcttccagtcaaggtatccacaggtgtacaatagttgcacaactatttttgctgtaaccaattgctctcagcttggatttgaagcttactctaaaggaggaaataaatgcttgtatctggaggtcataaccctgagcaggggaattcactaccattattcaggtaacttgacagggaatcaaattgcactataaatatttacattcatacccatagacaaatactacttttattttctgtcaaagaagctctttttgcagtcaacgacagtgaatgcagagatgcttagctgttcaaggagcatagactgacagttgaatgctcagagccaagcaaggcattcacatgtccctgactaatgctcagaaaacactgcaggagaaggagcagaaagagtttaagagccataaaattgtgagaagggatatgaaatgttttcttcagattgtgatgtagccatggcatgtatgaatgcattgcatgtattacacgtattgcaaacatgatcttacagcaacgtgtggttgcctgcattggatataaacattgggtttgtcaaaagtcaaacatgggtaggtgagggaatcatgggctcctatccctccatgctgaatttttgtctactgatagattctttttagtcgtgtgaacaactgtatgcacctgaccctgtatacctgatcaggctccagtggatagttccaaacagtggtcatataggtggtcctgactaaactcagttgctcataaaaataaaacaaaaagacatataagaaaggaacctgttatggggttttgataatagatttgagaaaaagactagacagggtgtggtgagagtaagcaaaatgtaccatatatatgtatgaaattgtcaaggagcaaatttaaagaagagaataaaaaagtagagtcctatatatattctatacattatgaacaaaaatagacaggtagctggaagacatgtagccatgtaccttatgctttctttttagctgtaccccccaacagtctatgacaatagcaaatgtatagccatgtacaatagcaccttcatgtctcttcctctcctgcttgtgttctgtgacccacacattttacctggtgctcatggagcttctctcatgactaaaatgctaggctctcactaatcccactcatcctggccgattctgccattgtttaagggggtagcacattgctttctgtaattgtcccttttaacctcttactttgatctcaggactcctccttagaatcttatagtacgtaaggaaggatagaacctaatcaaatgagtattctagttctcaaacacatggtcactgctcacctaccatgacttgacctgagattgcataactgttaattatatccctagaagtatgagccctggtagttctcagttcctatgtatcaaaacatgggcaattttattcctcattggaaaactcactttgatatattactggctgtgtgtgagaagagatgagtagtgggtgagactcaaaagacatatctctaagacatgttattctaaagcccctttaagaaagatgggcatgtcctcaaggctactctattttggcatataacagtctctcagaatagtcagtttggtagaatggggtaaatttctctgactaagacaggaaaaaaaatagtagagttaggcactgaacagaaaggcagagtgaataaaaatattgtatttttgatttttatagaagcatggctggaagaggaccaacagcatctattccagtgggaaacactggacttgatggctttgagatatttgacttcatatatcccttcttttgtagtctcattttgagtaaaaaagtctgtaaaacctacagtttgtgttagtgaattgtttagggtaaaaccagcaaacacagaattctccagtgataaggtaggcacactgtgtgaatgagtgaagtgacgtagactgtgcacaaccaaaacgccaatttacatgtctaattatgaaagacttttgtcccagaggcctcttctgattgccctaactttgggaaacttaaaatcgatgtggagcatggctgccaaggagatgggagatgatcaccaaggtagtggattgggtattgggctaaaagggaagaatcagatgagtgcagcagacagaaatgctcaactggggaacagcattgctcactaagctgctctgctggagatctagagaaagcttgttttatttatgaaaaggagggttagaaaaattcatcccctagatgcctaaatcatcagcggaattctccacgctccctcatacctgctgtgagtagtttctcatggcgtaggcaggcaaaaactttagtgtgggccacagttcagtgtcacgcagcatccaaagagcctgaagttagcagaaattcaaagagagggttttagatcttcccaagttgtggtattggctgaagtccaagccaattatagctacatctccaaggtgaagaaggacacagccaacatctgggttccatttataatcccaatgttccgggaagacagaagaactagttacacgagtgttgagtgagaagaccttagaagggcccatgtgcaatgcccttagaagcgttttcctgtctggcagctgccctgtgacatgagggagcttggctccttccattctgttgtatctgtaggagtgctctcatcttgggagtgctcaatattttccctgcaatggatacaggctggtacagaatcccagtgactggaaaatgggtgtgagcagctgaaaaaatggggaaaaaaaaaagttctgcagagcctgttgtagtagggtgtttcattagctgtctacaaatgggttatcgaggccctgggagtagatttagtaagattagacagaatgggcagctcaagcttagtttgactaattctgcttgaatttttacacatggatttacctgcatgtaggtattaagaacagcattggacaccctctgaacccccaatcttgatttttatcatttgtcttagtggttatttttgtataacatgtaacaggctttctagccgctaggcctggagagagtacacttactttcctttcttattgtcagctggcacatcatttttttctggtgttcctttggtcacaggaagtgaggttagggagaagaaaggggagaaacagggaaagacaaagaagagggaaaaaaaataaaaagcttgagatcaagtgtaagctaaggtgggagaatccttttggctacacatacacaggatgtattagtgtgactctggctcactgaggctcatggaggaggcatggactgaaggcttcaattcctagtgtacaaactccttgctggaccaactgaagcaaaaccatcagtcttatatcacagaaggtgtctggccaaaatcaggaagaaaggaagggtgacctttatgaaggacaagtgattcagaaatcaagtgctacttgtctgcctgtgtgcagttacttttttgtctagctaagaggaaaatggcttaattccagcacttgggaggcagaggcaggaggatttctgagttcgaggccagcctggtctacaaagtgagttccaggacagccagggctatacagagaaaccctgtctcgaaaaacaaaacaaaacaaaacaaaacaaaacaacaaaacaaaacaaaacaaagaggaaaatggcatcctcttgaagaaggctctcattgcaggggaaacaaactatagggcagactatgtaaaatgcacctgcctcctgtcaatcttccttgattgcttaaaaaaagttcatgagataaagcagagctcaaagacaggatcctgccctatctgaaacttataggcacacgtcttgactttccagtcaataaaacactgaaaaaattttgacatttccaattagcttaagtcaatttgagctgggatttcataatttccaactggaggttcgtcagagtccatgaaccatcctcctggagtttccaatgattaactgctaacaactacacaagaagacaaaacaaccacagacttggtgaggacgagaatatttatgatgagaaatgtaacggagaaagcataaagaggagcatgggaagctggtgttagactgaaatgtgtcttctctgttgcagacccttcattaactttaatcctcttgttcttattagtctgtttctccttgctataacaaattataggggatgaggttgctcagtggttcaagtgggtactgctcttgcagaggacctaactttggttcccaggcagctcacaaatgcctgtaactcaagctctgggtgatctgatgccctcttctgactcctaaaggtatcccctcccactatgcaatgtatatctacccacacagagacacatgcacatgaataaaaatagttcttaacaaattatctgaggctcaattctttataaagcaaaagggtttattcagcagaactttaggacccgaaagttcaagatggagagtcctcgacagtttgacctctggagtcatgacactaatgaagtgggaacacacctaatgctcccacatagtgagacaggaagccagagaattggaaggaatcctccttgctctattataagcttgatttcttgagaataactaaggctataacagcattaacatattcttttcaataggcaagccaaccaatgtgtattccacttcgtaatggtttcaatcatcttaacaccagtgttctgaggcccaggcctccaaacaaacccctgtgggtcaacgttgctgagttgacttgtgccctcttcttcttaaaaagaagtgctcatcccaggaacttcagaaaactagcttatttgaaaacaaggctgtagatgcaattagtcaaaacaaagtcagactgaagtggcataggccacagctctcaactccataagaggagatgagtgcaaggagaatgccttaagatcacccaggcagagagatgggaagtagccgaaagccaaggaatagcaagcagatcaggggctcctacaagaagcctgtgaaggcaaggatggctttccccacactttgcaggcaaacactggccctgtcgacactatgacttagcatcctggcattcagaaatgtaagttagtgcctgccttgtttaagccatcaactgcataatcgcttgctacagcagtgctgacaaaccaacaagagggttgttaagtctcttgcctcattatggaaaataaatccatcttaaaggtttaaatattgtgagtatagctcagggtatctgttgctgtggccatggccacagcaacttagggaggaaagggtttgtttggtttacaagtcctgatcacagtccatcactaagggaaggactcaacgcaggaacctggaggcagaaactgaatcagagaccatagaggagtgttgctcactggcttgttccctgtggcttgttctgcctgttttcttatataacccaggaccatcagcctaagtgtgaaactgccccgtagtgggctgggccctctcacatcaactgttaatcaaaaaatttactataggtgaatcttatggaatattttctcaattgaatgtcccttttcccaaatgactctaggtagtgtcaagttgacaaaaaaaactaacatagaggacttatgacattaaaatttcccaagagatttgtagttgaaatgactagtgatgaggtaaggcaggaatgactgtataagagtgggattcagatggattaaggaacagtctcttccctatgcatcctacctaatggctccttaattaacagaagtccctctactgagttaagagataacttaggagcctctgcaggacaggaggtgggtgatgcataagatttaaggttccaattttaaggacaccccaccttcaagaattcctcttgtttcattttgggatttgtatccaagatttccctgggcaaaagagttatgaagctaacatgtattgaaactccatgacattatttaactcacagcgaggcaattttttttttttctttaccatttctgtaaaccatgttcacgtgcatgcgtttgtcagccaatctgagttgcccacctctcctaaggtgagggaatcaaagtttaggatgcaaagcggagttccttcttggttattagctaagttctgatagcgtggtgggaaggaagctttgcaatgtttttctttgttccagtgttttttagaaccccaaatcaagatctttatgactcagaatgtgctgcgagactgtaagaagtaaaagtcaaaatttatattttatgcccggtgatttatgggctgtcccttttgccactggataagcagagaaaactatcaggatgcagtatttacattctcgcggtggaggcagcagcagccccaaatgccagaaacaatgtatctgacattaatgaaacacaccatccctctgactaacttgaaataccaaaaaggaaaatagttctcacacacgatgtcgtcttttataactttgcaggtataatctcactggagatccatagccgtcccgggacttaggaggactgcattttctcgctcatctactgtgggctcagagtctacagaggctgagggaatactctggggcctggggccagttactgaggggagggttggggctacctctgttgatattcctgcactccgagatgagtgaaggatgtttcactctttgccttacagagtgttgtagcggagagaaagcttaaaaatggctaagaagtgtctggagccccacactgaaagcttaagtcactctctgcttttgtctttgtcataagcaacaagtcaccagaaacaaataacgaatacactgtcaattccgttaaaaattttccccagtttagcacgtgaatttcaaaatgttcttcaaattattatagctattcatccacccactctgccttcaagacggctgccacagagcaccctgagcaccaaggcactcctggtgggccaactgcttactccggtattctggaatgtctcttgggttttcttctttcttccacccccttgaaatcctccctttcaagtaacaggttggggtgagtacctggatggggagagagagatgagtgcactggcccgttgaagtaacatgggtcttttaaaagaaaccaaggacaggcactctgcatcttaaggaaaagaaccccgtgcaagtcagggttctcagctcaagtcccggttcccagctcgggtctttgtgttctttgcaaagtggcccacggggacagtaggctgtacggcgagacgtcccaaacggagtttaacgcaacggggaggaaagtcttcaactttcaaaagcatcatcccgcgagaggaagtttcaggcttggcctagggaaaagtaccaggaggtgtgcgggggtggggcagtggcgatctgagaggtctctagagaaggaaggggagtccagcccgagagcggagttggggggggggggggcgaagagaggcggcatgggcgaagcgcccggcagcgcgcgagccccggctgctcggctgcgcgggagcgcaggcctggagggctcgggtgacatcacccgcgggccccttcctcctgccgggtgggtggggcctggcgcgccgcgcgggcgcggggtcaaggagggggaagaggaggagcaggcctggatgtgtctgtgtgaggacccgggaggggcggaggcggtggagcgcgtggctcccggctgcccgcgccagccctgcccggcccgacgcgcggcctcagtgccgcccctcagcgcagcgccctgggatccgcgcgcgcggagcgggaccccgccgggcgcggcctggaaaggagcgggaaagcaaagtaaggcgagcagtcttcccaagtttttaaaccaacttcgccccctgcggcggcggcggcggcggcggcggcggcgtcgtcccgcggctcggcgcgtcccccccagcgctcctccgagtggcggaaattagagggacggggcgggggtgggggcgcgcgagggaagaaggagccgggaaggagagcagagtctgaccacatctgtgaaaacttggggaaggagggcggggaggaggaggagcgcaggagcgcgcggaggggagcgcgaagggcgcgcgcggcggagctcaacttttgcaaccggggcgctcggcctggacgggcccttagtcgttgaaaagtcgacttgacggtcggggggctcctttctttctctttctcctcccacccgcggttgaaccaaatcagaactgtcactcagggccggtgactcagagggatcagattacaggatccctgaaactgatgcgcgggctgcagcggcgggagggagcggaccgggccgcaccgccggcgcccgcacactcgtccgcccgcccgccgctcccctcctcgcccgctcgccccgtcgccggcccacgccacaccatgcccgccggggccgcacgctgggatcagtcaggccatccacggtagcccgagtccgcctgccgctccgccggcgcaggtctgtggatttgggacctgacagccaaagccgcaggtacgtcccgcctgaagttctttgttttgcgggccccgcagccctccctgtcgagcttcccggcggcgtcggagcggcttgtgtgcgctcgcgccttcccgcgctctcggggatcgggtctcggctctccggactgcagagctcctgccccagggcgcgcggaccaagtttgcagcggcggcgtccgtgcctacttctcgccaagtgctgcgcagagctccgggagtccggagctgcggctggtcctcgcgcccccgcaagccgcagcttggcttgcgcgcagcgcctggggatgcgccgagccgccgctgccccgctctccagggtcccgccttcacttctgagggtgggggtgcggggtgagcggatggagggcgcgcctccgcggtgggagaggaaaagtgaaagttgtgccatctgtgcgtgatttggaactctgtctcttcctttccagaggtagagcagaaagaaagaaaagagaaagaaagaaaagtagccgtggcccttgcggtaaccaagaggccgaatttgcacagagcagagttgggtacggatcactctactctgctggggacacttaactttctggagttgcagtgggaccccgaggatgtggcagagttaatattgatcatacatttgaatagttggtgaagcgacttttcagcagatggccacatgccctcacactcggcccggcctttgcttattatcctttgatgaacttagtatccttctgtgaactttgtgcctgtgtcccggagtgcacctttttgagtaccaagccataccccccctccccccaggctttcttggctgtgtgtgtgtaaagaccacttagggaagtttcctgcaccgcgtttaccctttctcctcccccaacttggttgtagattctggccttgggtacagtgctcatggccctctgccagtttatatgtacatatatttatgtaaaacattttctcccagctctgtgccagctgttccacattttccagctgccacttcagtttgaaatgatggactgtcgtcctcaagtaaaagaactctttagtccgaggtatggagggccggccgctgtgcaaatacaggggcagtgccattagccccgctggtattattagttccaaaaacacctcgtgcccttcttttcctctccttctcctcctcaattacagcttttcacagcccagtacgtgcactctgctgaacattcaagtgattaaccccccactcccctttctaaatgattttgtgcagaacttggatgaggccggcaggctggttagctagcttgcttctcttttctttctttctttctttctttctttctttctttctttctttctttcttccttccttccttccttccttcctttctttctttctttctttctttctttctttcttttcctgaaatatgtgtctggtggaaataacttctagaaaaagagttgcagcttgagagcattgggcatggctgggggaaggggaactgtgctctgccatctgaaataatctcattttagtctattttaggggaaacctttccttcgttctcatgtcacaagcttgcactgtttgatgtcttcacgagttatagactgaattcttcaagaactggcctaaagtattaattttgagtatttatgtaattgctctgtaatttgaataggtgccttattgattgattcctgtaattatttcatttgggttttaaattaaaaattaataatagtctgacagtttcttaattacacgtgtcaagattattttgaagcaggaaaatgctgttttaaaatagtgaaataacctcagaatcacttcatttttctaaggcagcgcaatagaggatatattaaagcagtggagattggttttaacaatgtaaactgtgcagagtatctacagaatttgtttatgttaggaaatattggctttaacaatctggtccacgagctctgtggccagttagattatagtcagaccttaaaacaaacatgaaataacatttaaattagctgaaattgcatatttatacagagcagagagtttattttacactaaaagctatttaattagaaactctccgcctaaggggagatcctttcagggtacgtaattcttaaagtcagcctagggaaggctgggtttagctgcatgaataagttcaatgtgagaggtgtctgctgaaatttcacacaggcagaaacactttaaaagatatagattgctttattgctaatagactggcaggcttagctcagatgcctaccaattccctgtgctttttacacactccttgattgaactccagtgtccttacagtttttattgtatgtctaatttgcaaaggagaaaattcagcattgatgaaaaataactctgtcgcgttatttcattgcttacttaatgaaagcattgttaatttaacaattggattccaaggcctaaaagttggactctcctttgttttgaagccagtgaagttttcttaattacctgcatgctgcaagagttacaggcatcctctgggctcaggcatttagaagtgagtcccccgtaaggcatccatcctgcttgctgcattcccctccccgatttctgaggacagtttggaagcttatgaaaggaaacactttaatgctcattgttgtgtgcactcacttatatggagacagcaatgttctgagaaaaatcagtctcgaagacatgagtcattgagtcatgaaatgttcaggaaaaccttagtaatggaatgttaatgcttttagacgatagtagattatcttaaaagtcagacttttctcctttctgaaattgttgtaaatccctagctgaggagttctttgaaggaggttttagttctcctggcattcatattctgaggttggtctgatttgctttggaagattcaaggaattttctgccaacttttagatcgagaggcaatcaaaggctgaaatggctacagaaccaacacatacaaacacatttgttaaacaaaaggttctctaataatgatttcaggttgtcttctcattagagccagggagaagctgctgctcttcaccccacattgtcagttttctacatggaaattgatctgttctactttcaaagcaaatagaggcagacaataaactgcaacagggcccggcgctgctgcaaactttctcaagtactttccagtgtatttttcatctttacttttatttgatgggcctgtgaaatagagctgtagactggtgaagactttaaatgaaatttcacactttgatgattttttttttaaactttgatatattgacagcaaaaggagctgcaaaagcttttatataactcgagcagcaacgccaagcagcagtcaaatgtctccatgcatttgtgtttaactgcagaagaaaaacatgtccatgggcagcagaggttcttatcagccccctaatcccagatcccagcaaaccttgagggcatgccttagatcttgctgaagccactgtggactctcacagtttgcagattaagtatgctatgtgttcctggctccagcagtggcgttaggagcttgctaagcttcctgtcttagtatcccctttgcttaagtttttagggtccattgaaggctatgttgtctgaaataagtggcacttgttaatttagagactgtttacatatttcattctctctttaaaaattgccaaatttataacttttttttaaactgaaaagctaattatgtctggaaaaggggaggagagctgttggagagaagctgtctgtggagtgtttatgagctcatttgtttggaaactttgttgtctggattgtttttaccacactttccctttgcctaacccctgaaaagtagactttttccatttgaaataccaaatgcacagtagtttcctacatattccttagctgcctctgtgtgtgtgtgtgtgtgtgtgtgtgtgtctctgtgtgtgtgtgtgtgtctgtgtgtctgtgtgtgtgtgtgtgtgtgtctgtgtgtgtgtgtgtgtgtttcacctgaaagtgttttttgttctggttgtgcatgtttcaacccgacaaaatgtctcagaaaatctatggctttctaaagtagctgaatgaaaaagccattacatagttaataaggtggcactgggacactgaggcctcctcctgaaaggcgatattgtattgagttctatgtgtgcctctgtggtatctgtaaactatatcctcttatatggcatgctagcattttgtgtacgagtcataattaaaaaagaaaatacttacatcattgtccagcaacatgtcatatcattcccaagagaacccaagccaattttgtgtttaaaggttattcaatgaatgaaattgtgaaagcccatttgtcaaagtactgcatggtttctgttcgttttcaagctccaaattcattgtctgccctagcccagccattagtcatcagtgtattagtgctgccttcaggccatgctgcccggcacttcttcacactattacagctttgaaagtgtactctgtcgacttgtagaattactgctctgatttccgcttggctggtttgaggtaagtcccctccctcccttctagctgactgtaatccttgctttctttcaaagctcctttccagtgatttagaaaactttcttaaggaccctgttggcatcctaccacagttttgttgtagcatgcactatacatttaaattgtacctgaagaaaattggattggttgcaggcctgaagcatgtagaggggggctgctttgctatggaggggaagggtgctacagcaataactattggcatagcacattcgtgtacttgtgtaatttttatgtcctagaattaattcaacaatgagagacaagtatcattcttaaacccctgttgaaataaatttaaaatatataacatattcacttatttttaaagcagattatttttgaagattcaataaaatgcctaacaagagtgttttatattatatactgccattaaaaaaaaaagatggaaaactcatcaattagataaaagataagttcaaattttattaatgaaggaatgaggcaattaagccttgttactgattacattttatgatttttttaaaagagtaattcactccaaagatttattagtgtgcagagaaacctcatgcagcagctttgaatgactgagctgtatggagacctgggctccactggccagacacatggatcaggctgcactactgtaggacaaggcctgctgtttgaactgtgcaacggaattccacaccagtctcattgagggtgtctgtagcagttgatgcaggctagactgaccgtcttgtatgtataaagggtgaaggctgagtcagctggagaatgttgtttgaataagaaagtttatagaataagtggcccatgggtaattaattcttataaagtagaccctgcatctgaaaatccttaaaatttgaaaacctggctttaaaagttgcaattaagatttaactctcaaagcattaaaaatgaggagggtgaaatgaagaggatagtgctgcatgaagacaagctgagcatctttagcatctgtggccgatttaatacctaaatatcggtttctcttgtgtgatttaatagtcaggtggtggcctggtgtggtagctcatgcctgtagtcttaacattcagaaggccgaggcaggaggattgtcacaagtctcagacaagcctgggctttatcatcagttctaggctgcctggcctataatgtgagagaacctgtttcaaaccataatattcataaacgcagtatatccccctaagctgtattgtaaggatagagggtcataggcactgtaagtcatatacattctatgtgcatagcatattttttttctgctgctatgcaaacatgcttaattctttcaaatctcagtgaagcactcacacttttatgatatatgtggatgtggtgggaagactgttacagagcttaatatttatagactgatggagaaggtctgatctagtttttttagggagggaaggtctggatccagctaatgcagaggaagtttaggtgtcagtttgcttccaccgctgctgtgtctctaatggcatctgctgttctccatgcacaggccagtcagcgcacgggaggctgctgtgggaagagctgtgggaagctcaggagtggcatggagtgttagacctcatactccccttaaatgttggttttaaaagacctctggcagctgagcaggcagcttgtgatcatttctcttacatcaacactagaaaaggcacaataatgccattttatgattttcaatgtagtaactattcatgttgaatagttcccttggtgattgatttttaaatatataattttttgaaaagtttagatatagctaatttatgaaagcaaagttcactggatccaggcagttatttccctaataggacatctccattttgggatgtctgacaaaacgctgtcaaaatgtctacagtcggaagcatcacagtcgtaaggaaggaagattgaaaataatgaactgcagacctggggcatctcttggttttccagtgggcaacctagaccgagttcagttttcttattcactgatggggttttctgctttcttgaccttgtgggaagtaatcctataaaggtgaaataattgtctatgaaaaatactgtagttagacattagtaaagatttcattaggaacttatgaagttgagcttccttttctgcagaaagcaaggtaatgcagacaggaagtgaaggaaagccaagaactcctgggaattgtcggtgtgtcccagaggtcgtgcataactaattgattttaggttcagagagatattttgaacagaagaaaccctcaagcacattatagacctcttaagtttctcttccatgtgtgattacaagaaatggactaaattcttcacgttttccttattgaacctcaagacagtttctcacttccaaaactgatcaaaaagtttttaaagcagtattagctttgttctttatgttgggggggcgggcggagttctctctctgtgaaggaattattttctttaggaaatgggttatttaatagctccaggaaggtataaatattaaataggatttttttcctatttaaaaggaacatggttcctccctccatgaagtagcagctgatgtcctagtagtaggctggaagagaacgatcactcttctgtgagacatgcagggaaagcctgcccccagagtccctctcagaatccctgcttcattgtggatttttgaaacattaacatacgagggagaccgtcctgcttaacagtgtacaggcaggtgtgaataaaagccttattctcctgcagcagcaggttcttgagctacagggtgtgagttctcacattagatgctcctgctctgagtgctgctctgagtgctgctctgagtgctgctctgagtgctgctctgagtgctgctctgagtgctgcttatagccttcaggtgacttttccttctggtctcctagggcctgtggatgttctaatgtatgagaagcggaccaggttatcattaatccagccgtctgcttagttgtcttgaatctttaaatgcattaaaacaaaacaaaacaaaacaccatcagagttactgccaaggttcaggtatcttaacagcaaaaccaagcggattaaggaaatagatattggcagtgtgctggttgaaaagggcactgccagtctgactgcagcagtttcatcccatcctagactacgactacagctcattaattccttcaggagaaatgccactttaaactttggtgtggttagcactggtattttctgaaaactgttagtgttctgattgtaaaggaaccctgagtacctacagttcggagatgttgtcgcagagaaccaggggggaggctgctttgtgcaggtttaggattgggatattagcccagaaacttaggatacccaagatacaaggtacaattttcaaaacacgggaaactcaagaagaacaaagaccaaagtgtggacactttgccccttcttagaactgggaacaaaacacccatggaaggagttacagagacaaagtttggagctgagatgaaaggatagaccatttagaaactgccatatctggggatccatcccataatcaacttccaaacgctgacaccattgcatacactagcaagattttgctgaaaggacccagatatagctgtctcttgtgagactatgccggggcctggcaaacacagaagtggatgctcacagtcagctattggatggatcacagggagctagagaaagtacccaaggagctaaagagatctgcaaccctataggtggaacaacaatatgaactaaccagaaccccctggagctcgtgtctctagtggcatatgtatcaaaagatggccttgttagccatcagtggaaagagaggcccattggtcatgcaaactttatatgcctcagtacaggggaacgccagggccaaaaagtgggagtgtgtgggtgggggagtgggtgggggagcgggtgggggactttttgggatagcattggaaatgtaaatgaaataaatacctaattaaaaaaaaaaagaaaaaaaaagaattgggattaaaaaaagagaattctttactattacaggaagcgtctgtggtggctaaggccctcatggagggctttctgagagacagtgaggccatatgcctgccttgaccgttcccagcacctgcatctatttatggcagcctgggaagggggccaacttgatagacagtagacatttttgtgaatgaacatatttgttttcttgcagaattttcaactgttccgcagtgttttataatattgcaatgcttgtgcatgcacacacacacacacacacacacacacacacacacacacacacacacacacccctatttgaatttggctagttcagactacatagatgcaacaaacaatcctccttcccactgactgttggacatttttctgtattacctatagagagagtttgcaagttcccaagaatattcctggagagcaggaaagctaatctgacccaggttggtaagggatacctacctgcatgtgttgagctgctggaccatggcttgagaaccttcattagcagctctagaagacaaggctgcagtggttcagaggtggagcctctagggatgcagcttctgagatggacagggtgcatgcaccttggatggccaaaacctcaagttgccagcagggcaccgaagaacagtgaatgagcaggaattaaggcccagtggttggaggtgtgaggttgttccattctgaggtgtcaggacaagaaaccaccccccacccccctcaataaaatagctttcagactaaatgggctgcagcaaccagagcctgtcccttcgtaaatgggacatctgtgtgaaagtgctttgaaaacatagcattccctcacctccaaaattcttcatttttgtcaatgttacctccaaccctgtcactttcagagtgaatatctgctacaagtgttttccctggtagcttcagaaaactttttttagtcagtttcaggggaggttgacgaaggttcacacttggaatttagaaagaaaagatgtacctttaaggcaaattgctaggagagggagtagatgtttaaaaaaaaatggtctgaaattaattgtgctctggactttggcctctgggaagttactagaggtttggaatagttgaatgaaaaaagatttggttgttttgcctccaggaagtagcttttatccttcttttttttttttacctgtggaactgaagccctcaggaggcaaatactagttgcaggcagctgatttgcctgtaacctttttgctaggattcatacttaggtccccaccctcaccctaaaaaacgaaagaaaggaagaaagaaagaatgaaagagagaaaagaaaagcagaaaaaaagccaagtggttttatcctgcatgcagtgtcccagtggtgaaagactgaaggggacaggctggaattgtcaacaggaaagtgtctccggaggaaagtcttcatttcattcatgtctgaaaaatagtagcatgtgtcctacagagaaaagtatttggaataaagtggaattacttcctccccttaattcgtacagtctaaatgctatatatactttattgcttaaggttgtctatatagcttcagcttgccacggtttagcattccagccagggtcaactctggtctgtgtttccaaatcccttaatgtcctatgaaaaagccaccccgaagggagaaacagtcaccatttcaacagttacatagggtgtgggcatctatggtgttaaagcgttttctttgtgacaaggataaaattgtgtttttatcagtaaaataagctgatataactcaccatgctatacaggaagcagatgtctgccttggcaagttgccattttatagccctggactgagcattgactacacttaaataattagttgctaattaatgagatccaaaaataagttgtcaaaatagaagaagggggtagactttttaagttaccaaaggcctagtttttttaaaaaaatctatttcaaataggggtaggaattagtattttctaagatcattaattagtagctttcaggtggtgcctcttggcacttgtgtctttctctattgtgatgatttctgggagggtgagttgctttgttaaaatgttgccttaaggggtacccaaaaactgcataaaattcagttttaccaaggaactaagtgacttgttggttcttaccgggaaccttctttcttgatggggtgctgtctggttcctttgtgtgttatattagtatactgccccagctcagctaataacaccgtgtatcagttttgaaggggaagattgtggtatctgaatttggtgctttgattaaggattcctgatacaatttttagcttttgcagaactgaccagttttcaatggaacatttagcatagaagaagatgtatgtagctagctcagggatgtttcaaattcaagccacagcagagttagaagtcccgaggaccctggcgtgaacctttgtttacccagtaagcatttgtctttgtattagtggttgagaagatagacgtccactcctcatgaggcttccagtctagcagggagatgtatgttcaacgaagacttcttaaacacagttctttatcattacagttggagatgggataggttctgtgggttgtgaattcagtgttcaggaatacactttattcattctatacttacgaatataattgagtcctctcatggatacatacatagtgacgaacaaatataaatgtgtagagcagttatttggaagctgcagtgaccttgacagttagtgcttcttcaaatacaggctcttaggtgttaccgtccatgacagatgcattgtgtcagaagtagaactggaaaatcagatctcttagcaagcacatagcaatctgggtagtaatggctattcagggaaactctttgggagtaggggtgatatagattgggtcaatcattcttacgatatgcttggtttttgttttgattttggagacagtgtgtcacagtctagctttttggtggcctggaactctgtagactaggctgacctggaactcacaggaactctcctgcttctgcctcctgagtgctggaattgaagttgggcgccacccccaacccacctccagccttgtgatatactttaaaaatgaagtttaaagctgggttcaagttgaggaaggagtattgagagtttgaggccaggctgggctgtgtgtagcaaggccttaccttaaacagtaaaatcaaccattctgaggtttgtgtatgtatgtatgtatgtatgtatgtatgtatgtatgtatgtatgtatgttactgttaatgttactatgcatgtggagttcagaatgacttggggaagttgattacatcgtataggttccaggaatcaaaatcaggttgtcaggcttcacacgtttttcttagagacacaagcaactatggaaaagttctctttaggggtttttattcaggctcatggaggagttttggacggtctgtgatcccttgggaattaagtgtttctggggtaaagattttttgtttcttctcaaaaagcagagggcttctgttgtcgcctctaaactgagagggagtccaggttggccaaggttgtgctggacagctcctggggcagctttaggtaggctgtgagtgctgtccaaccccttgctgtttttgttcttgtttttcattgtgttctctgaatatgcttctcaattcagagtgggtcttacagttgttaagtatgtcttgtttctttttattctccaaaacactgtggtttagagtgaatggcaatagacactctaggaaaagatggaagtcaggaaatagccagtgccctagtgttttatgtgtagactttggctctgaaaccataactgaaaggcttgacttcttggtcaaggggcatctggtgtacataaagagcgtgagttaaagctgactaaacatacatgctctggcttttgcactttggccagttaaacagcttcttgttttatttcactaatcactgttttgattgaacattgtggcatctgctacatgtagaaaaataagccaatcagcagacagatgaagcacctaccttgggagttgcagcctagagagctggaagaaaacatgcccgagagtggacttttcatctttgtctcctttgtagggatgagtattctataagggaaggatgcgctagtgcgaagattgatgaataagattagtcggggctattgtcccatgagtggagctggtgaaggacaggtgacctgaatgtgcctgtagttgagtcttcatgtctgtgagtgatcccagtctttgttagcctcactttttgtccggcttttgtggtggaatggagggctattgtcttattacctttgtttaggaaattaacccaaatgaattagtgttttccttttcaaaaaacgtaaagaacacagtttgtctggatgctttgaggttaagatgttcaaggcaatccagtgccttatggaagtagaaatcctagtctactgagttattggggggctgtgggtaggcttgccacttggtttttaagatgtctaattagtaattacaaactttcttctgacttagaagttctcttagtgttccttcctataaagttgaccacccaaagggaaatgaacagaaatagcttaaagaataatgtggcacttgggttttatactgtagataattgaaaattgaagtatttagaatttattatttctcaacctgtgtgtccaacccttttagcacacctctatctctgaaagtttttatattaggattcataacagtagcataattacagttatgaagtagcaacaaaaataattttatggttgggggggtcatcacaacataatggactgtattaaagggtctcagcattaggaaggttcggaaccactgacttagataatttgataacaagtgatcagaaggaaacttgtacatgacgagctgttctgttttcctgtgcagatagcaaaggctggggttacttaagggacgtgaaaactcagctccatgggactttgacgggctccttaatttagttacgaaatgtttttttccagaaaaccctttggggaaatgtccattcaggttttgctaaacctttaggttctcctcaggtagaagatatagaagacttttgggtaaaggtttcttctgccattttgggaatttgatggcactgtggtgttttatagggattcctttgagaaacaagctgaagtaatgagaagacattatggaggcccaggcccacagctctacggcgactgagaggaagaaagctgaaaattccattgggaaatgtcccacgagaacagatgtcagcgagaaggccgtggcctctagtaccacttccaatggtgagtggccccacaactcccagcagctaagctgctgtcactgctgtgttctctgcatcccctgaactgaacatccatgcgtggaccagtgattctctaagagaggttcacatgggacagaggatggtgtatagggtgggcagactttagtcatctctatcttgacatccaagctgcttgttttcttcagtctactttgagatataaattgggataggttaggttatttataaaaagaagttcctgttttggcattttgaaaatcatcttgattttaaaatgctttgcatttcacatggaaaatctatagtagtcaaaataatgtagacatttttgatttgtggcaggatttctcccaccccaaatttaaagttgtctactggaaaggattttaaaaacttaacagctgaagttttaagtccatcttaagtccataaacttcattgttggttttgtaaatttaattagttgaattgatttcagagatagcacagaatcaacgttttttacactttaagcaaagtattgagaggtattttaattcaagcatagagcactccagcctccctcaaccgggaaaaccaggctgaaggtttgtggcgaccttctcttccattccaggttttcccactaggtaggccatccatgtctttgttttgtagatttcaggcatgcctccttgctctggagttttgtagatttcaggcatgtctccttgctttgagttttgtagatttcaggcatgcctccttgctctggagtttgtgtttatagatttcaggcgtgcctccttgctctgggttccactccacttttctgtgtacccttaggaagaataagttggcccatcgtcctagttctgctcctgtacgacctggctcactgatctgcccaagctgacctcctggctccttctctgtggttttataatttatgtgttccaaaaaagactttactagtttgacttactattgtttattgatttacaattgaagagtaagcttgactaggaagctaactgaagcctagaaccttcagctccgaggacaggtgctcctgaggagtctggctgctgttctgttccatcagtgggttacccagctttgcttcaggtctgcagcccttctatcagggttttgacatagctctatactgtgctagggggaggaagctagctgtcagtcttgcaggccaataagcccgggtttccattgatctcaagggagatatatttatgtttgagttaaaaaatggattcactttaccggaatgtgtgtaaaaatttgtctgtattgctcccctttttgtggcatttaaacccaagcttacttaacccaatctgaatatttgtgtcttgttttcaggtattataaaaagcatattctatttcaaatacatgctatcttgaattccttgtttttctggagtttataaatattaggctaacttaacattttgtaagtaggaacagtatgtaaagtgctagttatttggtggttttaatactaattttataataataagcactttatatgtgttaagcttcacaaaaacaccaatgttgttgtgtagagccatatatgtgggtgtttcctagcacaaagccagtgcaggttggttgaggatgcttttgcaccaagcggactgttagaagccactgtcctgtaaatcccagcagagggtcttcagtggtctttgtgggaagatgctgttgcctactgtggatcttgcttccacactgagacacatactctggggcttctccgttgctcctcagcttggcatcagtcagtctctgaccacagnnnnnnnnnnnnnnnnnnnnnnnnnnnnnnnnnnnnnnnnnnnnnnnnnnnnnnnnnnnnnnnnnnnnnnnnnnnnnnnnnnnnnnnnnnnnnnnnnnnnnnnnnnnnnnnnnnnnnnnnnnnnnnnnnnnnnnnnnnnnnnnnnnnnnnnnnnnnnnnnnnnnnnnnnnnnnnnnnnnnnnnnnnnnnnnnnnnnnnnnnnnnnnnnnnnnnnnnnnnnnnnnnnnnnnnnnnnnnnnnnnnnnnnnnnnnnnnnnnnnnnnnnnnnnnnnnnnnnnnnnnnnnnnnnnnnnnnnnnnnnnnnnnnnnnnnnnnnnnnnnnnnnnnnnnnnnnnnnnnnnnnnnnnnnnnnnnnnnnnnnnnnnnnnnnnnnnnnnnnnnnnnnnnnnnnnnnnnnnnnnnnnnnnnnnnnnnnnnnnnnnnnnnnnnnnnnnnnnnnnnnnnnnnnnnnnnnnnnnnnnnnnnnnnnnnnnnnnnnnnnnnnnnnnnnnnnnnnnnnnnnnnnnnnnnnnnnnnnnnnnnnnnnnnnnnnnnnnnnnnnnnnnnnnnnnnnnnnnnnnnnnnnnnnnnnnnnnnnnnnnnnnnnnnnnnnnnnnnnnnnnnnnnnnnnnnnnnnnnnnnnnnnnnnnnnnnnnnnnnnnnnnnnnnnnnnnnnnnnnnnnnnnnnnnnnnnnnnnnnnnnnnnnnnnnnnnnnnnnnnnnnnnnnnnnnnnnnnnnnnnnnnnnnnnnnnnnnnnnnnnnnnnnnnnnnnnnnnnnnnnnnnnnnnnnnnnnnnnnnnnnnnnnnnnnnnnnnnnnnnnnnnnnnnnnnnnnnnnnnnnnnnnnnnnnnnnnnnnnnnnnnnnnnnnnnnnnnnnnnnnnnnnnnnnnnnnnnnnnnnnnnnnnnnnnnnnnnnnnnnnnnnnnnnnnnnnnnnnnnnnnnnnnnnnnnnnnnnnnnnnnnnnnnnnnnnnnnnnnnnnnnnnnnnnnnnnnnnnnnnnnnnnnnnnnnnnnnnnnnnnnnnnnnnnnnnnnnnnnnnnnnnnnnnnnnnnnnnnnaatgtgtgtaaaaatttgtctgtattgctcccctttttgtggcatttaaacccaagcttacttaacccagtctgaatatttgtgtcttgttttcaggtattataaaaagcatattctatttcaaatacatgctatcttgaattccttgtttttctggagtttataaatattaggctaacttatcattttgtaagtaggaacagtatgtaaagtgctagttatttggtgcttttaatactaattttataagaataagcactttatatgtgttaagcttcacaaaaacaccaatgttgttgtgtagagccatatatgtgggtgtttcctagcacaaagccagtgcaggttggttgaggatgcttttgcaccatgtggactgttagaagccactgtcctgtaaatcccagcagagggtcttcagtggtctttgtgggaagatgctgttgcctctgtggatcttgcttccacactgagacacatactctggggcttctccgttgctcctcagcttggcatcagtcagtctctgaccacaggttctcctcataaccatgttgagggggactggaacattactaacctgaacccagtggtgacttgggggcctggaggcctgggccaaaagctagccagagaaaggacagtcttaaagctagttctgcacttggcataatcataggcctgtttgctaagctactcacactcttgccttcctaacctgatcagcccttgaggcccacagcctgtccaaacgtgcacgagtcctgtctcgtatggacataaatactcactagtcatgcttgcagggcatatgtctgaatgagatctgtctcagagtagcttttcagaattcctgatctaaagaattcattccttttcatctggggacaataggaaactcgatgaaacaaaacaaaacaaaaaaattgttatattttttctaaaactggatttccacctaatagactgactccaggaaaataagcaaatgcgtttagaacacaatacacagtgcaaaagaaaggccagtgaaggcaagcatgacacctgtttggaatccctgcatttgggaggaggctgaggcaggagaattacgagtttgaggtctgcttgggctatgtggtgacaaacagaggagtgtcctgtttcctttgtttatgtgaatgctaataattacagtgatcttttcagagttctgcggttttcatctaactaggttggaatctttttactgtaccatggttgtgggtaagggttgatggttgggatcacagtctccatactgctcgctcccttcttgcctgcttcaagctctgccttgctgttattcacatcagtgtatggactttcgtcctgtgctgcttgggttagagcttttggtagggagccttgcaaagattggtgctctgtgtgtgttgacctgtggtggaaattattgtggttgctgtttgtgcactcctcagttgtctattcacctactcctttctctacagtttagaagtgcctgaatacctacactgaagtcattcacaaaaattggagtcattaagataccacaatagggggcacagtgatcgtacctaattccagaggttatgcttgccttaagactgctctgatattgagtttgtaactagacagttaaaagatttagctcagatatcaggatgtatgaaccaaatgaatataaagtatattttagattctacccattttgtgattaaaagtaagtaaatagaaaagttttgttattggtgaagctgttggttgacttaattaaccttcccagtcattatgtggtataatttgttcttgattgtgaacatcccagccaaaccacgcacattccactgcgtgttcttacaggtctgttttcttgcttttctcaattgagtatctgctcctagagttttgtttaaacaaacatagagacacagccaaaatatatggttcaaaaatcttgaagaacatggtaaataaacatttgctacatgagattgaaatttaaaataacatgagtgaaaagttgtgctctaaatcttgtgtcgggggaaagaaaccaagtcaaattagatttgtgtagcttttcaggatccacacgtgtaagcagagccttcagtgatctctgcacagaaccacattatgtgcatagtttcctgtgtgcacacttcagctttaagcagttcgtgcttttcgtgagatggaagtgacacaggcaatggtatttagccttctgaatgttttttaagtgcaattgtggcttaagagattattcttgacatctaacaggatagctttcatatataaatgtgcatttagagatattaggcctcacattggcttgagggtgtccaagtctgttaataaggtaagctcttggtaaatgctttaatgctctctgtttttgcatgattcattacttcctaagctacacattgtattttctaagtaatgagttttaaatctgcatttcttttgctctccgtgttttaattaacctataaaacttctctgtatgacttgaatatttaatttaaaatgttttgcctcatttttggcccatgagtttttcgtttttttttttaatagtcccttgataacctatcccttgtattttctgctactttgcttcaagaaaacatggtagcacccaccctgaatttcagtactcgggaggcagaggcaggcacatctttgtgcgttagaaagcagccgggcctatataatgagtttcaggccagccaggttacatagtaagaccttgtctcaagaaggagggtgtcaaacttattagaagggatccaggctctggttttgagtttgtcttaataagtgagatattttataagttgataaaaagcagaaattcacccaatggtgatgaggtgggaaacagaagctgatagattaattgatggggcatactctgtgcttttgtttcttttgtttgtcttttgcttaaaagtctttgggatttatgctttcaaactctgcagcacataggcattaatgcacgtgatgtccgttggacttatgactagtattgagatgacttgtacttatgttgaaagcttgaaatacattgttgctctccgccataccttcttgtcactttaaagctctctcagtgtgagagtctgcatatgtgtaggtagctgatttaccccagatagaccttagatttttgagtttttagatttctttacctttcttcgcttcccacatcacatttttggcacatgtaaagtggataggagggactctcaggtacttttcattttacgttatagggttcttctgagcacacgcaggctttggatcacaaagtttgggttgagtttttgtgatgccaagtgctagttgtgtgagtgggtgattcatctcttagtgtctgggtttcctcatctccttagcatggtaatagttacattgacttttcaaggacttatctggagtagttctctcattccaccatgttggctccagggattaaactcatttcatcagtcctggcagcaggagcctttatcctctggtccccctcacttgcccccgttttcagaagagagggaaaatgtttggcataggtaatgatgaactcagtggatccaagaagatttgtaaatcacaaatctaaccaagcctgctcatcttgaggaaggatggataaaagaacaaagtaacaaaggagcaaagctttttgccctctttccgaaagtcccctaactcagaaaggagtacagataatggttctgtgagaacatagtttaaagaagattcatgtagatttcttaactcttgaaacctggctattcttcctacgcgttgcattggaagtagcttgcgtgtgttcacccctcctcattgtttgcaggggtgagacacccctctctgaatgccatgccagcttgcactgtggcttgcaccgtattaatgacattctatttattctacttgaagaactttttctttaaacctaactaaatggtgacgagtaatcttctcatagcaactccgtcttgggctccaagactacttatccctgagctactctgctttccatattagttagctatactgtccaggctggaagccttgctgtcaccctctgacccccttccaggcccctgatcctgctagatttccctctgctcaatcacccatttccctgcaacccactacactacactacgtcccttccatccttactgtcccatgccatgacggttcagagtggccttctgtccactcccttggacttctcatgctctgcatgctcctgttggatgagcagtgttgtgattcttgctgtgaagtccctgttctgtaatcgtcagtgactcatagggtgaagtgactacaggatgaagctcagggccattgacttaatgtgtagctatcttctaaaatctgacagcagcctgactctgatctgctcattgattaagtgcaagggcttcttgctttgttcatgtagttctccacagaccacgagttctgctgatatcaccaggtgttggctgtcagtgtgcaagtgtgtgttctcagtttcaccatgcatttttttatcctcttggaaactgcataataactttaatattttaatttcttcactaattatatcttaattaataaactttgtatgttagaatggttttaggctcattgaaaccttgagcagaaggctccttcccttcctctccttactaatattttgcattatgtgttgtcagaaataatgaattaactaaaatctgtagtttgcattggggttcccaagatcatgagcgtgggaggggatcacaagtgactgagaggtttcaatcctgagtgcttgcaggaaagataatatacttagccataaaaaggaggttttgataaatgcatacaatgtatccaccattgcagtacctgtagaatagtatcactatcctaaaactcccatgttctatgtgtgtatccttcctccatctctttaacacttttaagttttcattcaactttggtaaaatagtgcctcatttatctgccttaccctcctccatagcttgcctcagtgcagtgttgatggccaagacaaccttatcatatggagattagactaggaagtcatttcctaggccttccagacgtgcagagaagagacagggggcatgtacgtgaggacacttaatagtgataattaccttaaagccaaagtttaaactttagccttgctggaaaaatgtcatgtgatcttgggctagggctacataccttctgactgccactgtgggtacgtaaatatttcactggtagtgattcactaggtttaatttggcaggatttaattcactgataaattttatctccatcctttcaatgtagtaatgaagtaatgtagtgtcatttgttagtaatctagcaatggatagattttaatctgattttgagaatcagccagtactttctgcattcattccagatatgtggccacaaggtctaaactagcaggccagtggatagtggcaaccaaggtcagagaatgcctttttaagttgctgttactgatgctgctcaatagttagtgaatgaaatgctcattcgtaaatcctcagtgagaatctcagatagaatctaattttgtactgagatcgtacagtaagaacaagtgctcccaatattgaatctcagtcgtaaatttcttctaaaaaaagaaaagaaaagcaacatgtagacaatcggattgattgagagcagataacaccaccatcttgcctagttctggcacccttgtagaataaagagcatgacttgtgtctgctctcggaaagtccctgggtcgcctgtgactgctgtgatcaagtggtgtgagcatttcataatccagaaacacactggtcagaatcagaaacagccaccaaacagtggaagctcaagggggcaggaggccacttgtgggagacgtccctctgggaggtggctagtgacctcctacctcccagtagtctgaccctgcacccaggcaggggtggttccatttcctagaagctcgcaggaggcaggctggtgctacacaaccacagtatgtacccagatgcacttccaacacacctgcttctgcttacccgtcttccctctattcttatgtggtaaaaataactcctcgtggtgatcatttctgtgactttggacagatgcaggtagtttaaccatgaccatggtcaaggcagagtagtgtcccctcttttaaatttgaacacatatttggactttaaagttagcttcctagttaatgcattggtggagtcactggcagtgctaggaagggtagaaactgttcttggagattatcttttacatttttttatagagcctgtcttctaggcctgtgtgtaaagtttattcttcctattttttttttttttttttacatttagttcttacagacctaagaagttattgaaaactgttacaaaacacactacctaggttctgtgagcttgattcttttttttttttttttttgagaatacagacaaggtgtattttggactaatttaaaattgcattttatgttgaaaactactggtagccatattgataaggactttttgtagttgtttttgatactgtgagttatttgcacgagaaaattagaatcttaatatttagcacagctacaacccagaggaataaaatagagaagtctttgctaagtcagaagactaatctgtcccccctccttcttcctgcccccaccactcctttatttctggaagcttcttctttttttcctttgcttttatagataggacttcatctcaggtaggtagattttgatataaagttatcccttagcctgcaattttttccctctcctgcatcccccctgtctttggctttttcctcttcttggtttctctcttctttcttctttttccccttcagctgtagaaagttgagttccatcctaattatgaaatcttcggagaccattcccacatggttctgtaaatggtagctccatccctgttcttttcatctctctcagctctccagcttgacagctgaaaaggtctgactgtgccacacaatggtttgattggtttctctgggggagactttcccctgcctcatcatccgccaggcaggtggaccagaaagtctcttgattcttttgttgcctctcaaagtccgaggtctttgactgaataaatccgccgtcatgggataatttgctaaaaggagactgtgagatgccagagaaaagcctcctgacttgggtgctgcattaatgaaataacggagccttggagtttgcaattgaaaaatcactaggaatgcaatgggtggagatgggcctcttttatttcccataataaactttgaattctaccaatgaaagcatgcctattgtttcgcaggcctgcgggcctaagtgtgtgtgcatttgtacccatgtttaagagggcagccctgcccgactttgtcggggtgctgtgtctacttagtcactagattattactagtggatagaaagaattccatgtgacagagctaaggctgagttaacacaggacgaaaagtaatttacagataggctgtccccagccatctttgtagctcctgataaggtttcatttcagaatggataggcgacatttccacttacgggcccattctgcgacatctgtgataacagcttctggatcctaattgaaattggtttcaaaatggattttcacttttctctgtcgttggaaaatattgaatggactcagagctgccacagagaaccctagaccttggaaaatggagcaggaagctaggctcatctttcataacagtggtgatgatatgacagttttgttatcggtcttattaatgaaatcattgatcactgatgagggagttaataaactacatcccactagcatctctgaagctcaattagactgcattacaaacaagggtgggagaggaacaaacatcagtgggctccacggacgaaggagcagttagttttcatctcctcagtaagcattttggatgagggcattcagatagcagctcaagtagagagcgttgtataaaccaacactgtatctaagacttttctttttgactcatagagaattattaaacaattcattaagtaaaaaaattgagatagaacaaaattgatttgaaaaaatagtactgttttcctgaaataaaatatttaagtagacatggaagttcttattatataacgagtgctttgagatgggaaaaatggcaaaacacgtttccccaggacacctcctccacagaagagcttgagggatggtcctccgtaggttaagacgatgaagctcaagggttcataacctaggctctttgaaagaaaagtggcttatcacctcttcctctctgaaaacgttctgagagtcctagtcagagggaattaggcttggctttaatgagcgcgctctattgtttggggttgggcagccctggaatgtcctctccccctgtcccgaaggaggggaggggatgctggtgatttcttaggtttcacagtgggtttcactcctaggtgtttctcctttctctgtgccagcaaggatcaatgcagcccatcccagcttgaaagaggatctgtgatcaaaggcatcaatgatgtcactgatctccagtgattgattaggaccagaagttccagagacttcggcattttctgagaatttcaaattcacttgtgtctacaactaggcttacttgggattattagcatttaaccagcaaaattgttaaagtggaccacgctgctacacctgtggccctgccagtgtgcttaagcctatggaaacgatgaccacattttataagcatcattttttaaattataccgttaataaatagtatgtctgtgaattggtgcaaggaacttggaattctgtgtgcaattggaagccatttgggaatgaagaccttgtctctaaaccagtttagttgtatatagataggtgcacgttaagatttaaatgttttattgattttgaaatttaagtatttcatatgcagaatttaaagtcctctgagttatttttgtgggaactgcctaacatttcccctttgccttttgagaggttagcttctttctttgtgtgactatatctttacaagtaaaactagacgcatttgatgctgagaggagccctgtacagtgtgggagggagcatggggtgagagagaggtctcagtggaactgctcacaactgcactgtagtcactggcttagctctacctacagcagagactgaaagggtaggggaaggggctattttggaaagcactgagccctaagaaagaagagggaaatgagaatggagaatgttcactattatttctgctgccttccatggttggttgtaggttgtcaaggatttttggtacatgcttgcttataacaaagtttttttttttgtttgtttggtttttttgttttgttttgttttgttttgttttaaatcagaaaacttttagttctgaaccgggttgaaaagtgtgttttgtgtgtgaggagaacagagagtgaaaatgagcatgggagagaaaatgatgtgccccttagatctgaacctgctatgcttccgtgagcctccttttggtggcatagcttttactcaaccagcggtgataaaatcctgggtttagatctttgcctatacatcaaaagaacattttaggaatagaacagtggcataaagtagtgggactttcaacaatgtaaaatacttcctggtaaaataggtctgtactcttcagttaaagatgtcttccaagcatccaggaaccagaagatagatcgtggcccatttcatattaagtttaaagccaaatctcactaaaaatcaaaaacaaaaaccaaataatcccaaactaatatgcctaggattgttttcaaatcctggcacattttagaacagtagaaaattggtttcctggggctgcagcaatggctcagcattaagagcactcactgctcttgtagaggactcgttaggttcctgaggtacacatgtggtggctcacagatatctgtaattccattccaggagacctggtaccctattctgactttcatgggcatgcatgtggtatacatgcatacatgcaggcaaaacactcatacacagaaagcaaaataaatgaataaataaataaataaataaataaattctttcctataaactttgacagcagttcctgtataggctaatggtgttttataaatagagtttacttagcaaaaaccatatgcatgcccagtgaaataatcttatatttatttatgttttgatttatagaaaacatatgtccttgacaaagccttgggcttttttccacaattaaaaggaatcaagcttaaaaaaaaatagctaccatcttaataggaaactttttcacataaatttaaagcattttctttgatgtattttacacaaagtcagaatgtccattagtttgacccataaagtagatgggaggaattcaaagtgaaaaagatgtgtataaatttatataaatgtatctgcctgtctatccatccatgatcactctttctcttgtctgtctccattcatatacacatcaacatagttactggttgaatattggacaaatgcagtgttaaagaggctgtgcactctgggtcaggagatgtgcagtggtatagcagagaaattactaagagcatctattgcttgttctcattgggactccttggtttagcaggaaatggtacttctgtgctttttaagatttatttttattgttttaaaattatatgtatgtttgtgcctcttatataggtatgtgtatgtgtgtgcctgtgtataggtatatgtatgtgtgtgcctgtgtgtaggtatatgtatgtgtgtgctggtgtgcaggtatgcgtaagtgtgtgcctgtgggtatgtctgtatgtatatatgtgtccctgtgtctaggtgtgtgtatgtgtgtgtctgtgtgtaggtatgtgtatgtctttgtgtagctatctatgtatatgtggatgcagtggtcatggagaccagaaagggtaccagattccctggagctggagatacagcttagccacttgacaggggtactgagaagtgaatttgagtcctttagaagaacaatgcaaatgcttaacctctgagcatttctccagctcattttccttcttcttatttttttaatgattggactgggggcagggataaaataattattaaatatggaaacatcagaaaggaatgcttgggtatattagtgatacaagtaccaattatacatacaattatatgttagtatggttttgtattttatattaacttggaggattttcattttagatgtgagagattatatgttcttatagagccaaaaagaatggttaaccttttacagaaattctgtttcatgcactctcaggcttctgtgtcttggaaagctctactcctttagtcatgaacaaatactactgatgtggtaagtatgtctgagaagtgagccattttacagcacaaggattacatgaaccatcctggaagtttacagacaggcctcaaatattggggatcctttggaaccccaccccccgttcctttaacctcctgggaccttgaggagttttatgacatattatttactgaaggcactgggtattgctagattttctccaggagaatactgagtgatcagaaatgctctttgaacacccgtgggaaggcagcctccagattttagggacatgaggatgaatcttacttctatgcagcgttacagtagtgtaaccccgctaactctgtaggggatgcattattaaaaatttaagagattcatacttggacatcacttatctctaaaaatgaaggacctggtcacatagatgaaaagaactctttgcctccaaccttctgtttcagtgacattcactttaattctaaaggaatttagaagactatagaatagcaggaatgatgtcagctatgtaagagctggttgagaagaataaattaataaaatttcagtttaaaaaggtattttagaattctctttaacttcaacagtgtaaactccatgagtaggtccatctcaggttgaaaatcacttagggttttatttaggacaaagcagaccatcacactgttaaatcaaacaatttggatgttttgaaagataacttccagatgtcagttttaggaaccagtgcagagagatttccccagttctgcctgctgtgtagatgattacaggagtgtggttgcttatgcctgggagttgtgtgtgtctctgtagccctgtttccatctcttactgacctggcattttgacctgaccttatcttcctggtgtctgcttgtgggcctagaagggttggtaactgtgtacgactgagactttcagccctggtttctattctagagcctgtgaatatcttcatagaggattttgatttggcatctggtcttttgcagttacacttcattatatcttttcttacagcctttgcagacttttgtgttactgatttttagattttttaaaaaccttttgcaatgagaaaaggaaacaaaaccaaaactgcagtaaagtttgattactagacccctaaactgtggccctctgaagtaacgtttgtttcagtttaatcccttagcaggaattcataggcaaagactggataacattgtagctgaacagttaggcaccagtggttgtacagcaggggagagaccccacagtcactcctcacaggaacaccagcagcactggtcatcatgggggcagctggcgtggtaattcattttagaaagcttttctgtgagaaatggaacctacagagatctgagaaggacactacgcctctcttcatcctggcagccaggcacctgatcattgtagaatgatgtattgttcatattgttcctttaacacaaacttggtttattacatccaatgagttctgtttgggaaatttagaaaattcttaaagagaatcatgaacgtggcctggatcctcaccatttgaacataatgtttgttcctccttttttttattcagtgtctttttcctatttactttttttttttagtttttttttattagatattttcttcatttatatttcaaatgctatcccgaaagtcccctataccctccccctgccctgctcccctacccacccactcccacttcttggccctggcgttcccctgtactgaggcatataaagtttgcaagaccaaggggcctcttttcccagtgatggctgactaggtcatcttctgatacatatgcagctagagacacgagctctgggggggtactggttagttcacatgcaggaaccatttttccatatcattaaacgtcctccagtttgctcataaagactgtgagagtcccctgtctttggttatatgctttttttccctcttttttcccttcagtaaataatgatggggagaaaaatcattctcaacaaatctcttgctctgagtacacttgactgaattagcttcaagaaatgtatccatgtacatttccattcagctgtgtacgggaacatttttagacattccaacatcagtgaaatatcttttaatgagatatgactgtttaaaacctcaactgttcattaagctattaattgaagtatggtttcccaaaatgagtacacagtgaagaccacgcccaggacaaacgagaaaccctggcctttcattcatgcggacactggtggccattgggaagcttccctgtggttgcttgctggaaacaccagctttcaggcgcctggctttcagtagacctgacacatcttctctgggtgtggactgaagaatgtgtacatcctcaggtatgcatatttagcttactgtatgctacggagcagtgttcttgagtgggtctgcatccttgctgttcattcccgccaacatgatctattttaattctagccctactgttgtccatacagcgctctccagttgtggttttaatttgtccctgatgagttaaggacttagtcaccttttaaaaccctgagtggctgtgtatatgttctttttgtgaaatggctgttaaaatctgcataggtaggtggatgataggtagacagatagatgatagatagatcatagctccttgggataatattaaccaggcattctatccctggtaaaataaatatgacatttatctgattctgcctttatatatcattttactgctttttctgaattactttatcctgttgatcagtctgtttgatattttgtcagtactatgctctctcacgtattgtatagggagtacattttgtttgagggtgtgcatttatcttctgttattttccccgttcagatagttcatggctataacttagtggaactttagaaacattgttttagaatcatgttgatgaaccaatacatatggtaaaagtatatggatagtgtgatcaatatcagcaatcgtttctgtgtctgtgaagagtaaaaggaagtaaggtaaagagggctgaactacgtatcatttatttcttgaaagaatagtgttttaaacaaatctgactcagtgtcatcatgtattacgtctaggggtgtgtgcctggatgcttatgatgctttctgaagcagtcacaaatccacggtatctctgagattttgttgggttgatagtaagcagctgtaggcattattacagttaaggtgagtgcaagaactctctattttctgccatgtgtgcatgcaggtgctttctttctaggcagatatcaaaaccacacaaatgcctactggctttggtgccaaccttctgccttcatcttcataagaccatatttatttatttttaagcgtaacttataagaaagtgcataagaaataatgctggcaagaccttccaggtgtacattgtattttcatctgttatattttaacacattctggtttacacttgttgcatctgccttggattgaaaattgcaggtaccttgataagcactttggctgaagtgaatggcttatattatttcaggaaaatgcaaccccaccccagcccctctgtatcatgctgcattttatcagctcatagcagctaccctgttatccactggctttttcttctaaggtttctcaggcatggggaatagtttgaggctttatcagtgttggagttacattggcagcaacaagaacggccaaaggactgttggaactgaacttcctcttgctttggggtgaccttagtgggctaatgacttgggatgctggtcttaagactgtacaggtcatgaccaaattgaaagaagcttatgtgaaggatgaggcctgagtatgtgatgttttgctgtgattataactttatgaagaggtggatcccatgtgtctttgagactgccaaatagtatgctatccaaccctttgaaggtagggaatgttgccatccaaggtgtaattgaactactttcctaagtcccagccttatcccttgaaagctggctcacggtctgctctaagcttttgaaaataattcagagacatgagtcctatttattccagatcatctagtgtagggaagacttgccagcccacagagaaccttgaacttccttctttccccgtaggagtgtctctgggaaatcacacatacaatagaacttttcatgtctagaccctgcccaggggatttctgtctaataagaaagtttttttctctctctctcttttttttttcttctttagcatactcagaacagaacaaaggaagaggttgtggacagagtgcgggaaagaaaatgtagcaaacactgggtcatgtatcttactaacagcttcattctgacatataggcaatcttgtaagcacagggctcagttttgctgatgtgctaccatagctaacaaactctataaggccgtgctaaatgttacacacatacttgacttggatgagttaatagccagatcacaggatactcacttaagaagtataaataatgtctctagaggaccaaggaaagcctctatgcaaggaaaggcactatataagttagcagctttgcatgtcagcagtgaaggcagggctgagaggagtggggactgggaactggagagagaataagatgaagaagaaagacatccaaaatagaagcagccatgtaagcaaagacctggaagtatggatggcattggtcatttacagaaagatgaatgcattagggctatgacctagtaggtaagagctgtggagaggtgaaggtggtggttggaaacataacaagttgtggggtcccatcaaacagtacaaagactgttggcgccatccttaggggagtcggaagggtcagtgatgagatctcaattgctttagagtcactcaatcccagtggatagtggaggtaacatgcatttaggggtttgcataggattcactcggagagtggaagaagacaaaaagagacaatatcaaatcagtataaagaaagacttccatatctcatattcattatagtattatctttttagccaagaaatgggccagcttacgtatcttagtctgatgactaagtttagctgatgactgagttttgcagactttgagttctatgtcttactatttctaatattaaatagtatgtggcactctcacatagagagatttttttttttaaaccaaagtatattttcttttcagtggtcaggaataccaatacacacatgattgtcagagaattctttttagaaccagtcttctaaagattgaaagctttcatgggttctggagtctgccctttttttgtgtgtgaatccactgatgagagtcctgaaaagtgttctgcctttactcagaggaagacgtgctcagtgaactccaccacgctgtttccaggcagtactagtcagagcattcttcctgtgtggggcgaagtacaccttcccagaacttcagtaccatctgtttctctttgtcctgcttcctataaaagcactttaacataggagtttgattggttgcaggagcagaaagtgggctctagagagtcctgataactcccaacccccactgtgcccacagcttggcttagtttagcatcacatttccggaggagttatagctactgcaccccactttaatcatcatccctgcaagcataactgtaggcttgtcatcatcatgaaggccaagcaagacacagcaggtccctagtcaacatcatggcggctgaaagccaaccagtcccattcactgccacctagactgagacctagctggtcctagccactatcactagggctgaactaagtagcaggttggtcactgtccctgtagctataagcaggttatgagactgagttatggggcctctggcttcagtcctatttcaccataataggcctcatatttttggtgcctaaagcagggataagagagtaattgcagtgaatgttttgagaataggaaatgtttcaatgtaagaaattgttatggttacattgacaggatgtatttgtatactagcctaacaaaggcaaggataactccagggattatcttcacagggtatgagatagagaggccagagtttgatgttgaaaaagaagaagatgcagaggcaactacatagcagctggccttggtggagttccagttcaaggccgcaaatacacagcaaactgtaaccattgtagacactacccatgtgataggggccctccacatatttcattaccagcaatattatcagaattgtgagaatgggagaactagggaatggggtgtacctctgaagggcaggcccagcaataccaatgcttttacaggtgaggatggcatcttaatagatgcggagaccttatggatattatcccatagatggtgaagtgatagagattgcaggcaaccagggtagcaaggtagattaacaaggtgggacatatcgggggattatagaccatgattttgtataggccttcttttccaaagactgcctaaagaggacgacaatgaagaggttaaggataatcaagatgaaaactggaaggtataggtaatttttctgacctcctagacacagttctttaaaagcaataaattagatatacatatgtgtctctttatgtagtcatatgcatgtgagtacacagtgtctgtaaggccagaagaggatatagtcctctggagttataggcagttgtgagcccccctgatatgagccctagaaacttaactttggtcctctgtaagggcactcctagcgtttaaccaccgagccatctctttagtctttcatgctagttctttatccccaggcttctgtttgtcagagtttgaggaacaggaccctgaggtctctttactttgttgcgtggttggctttgggtattcactggggaactacacagtaatcaatatggtatagtgtgcatatagcacattagtccactgcagtctacatcagttcaccaatgtacagagtagcctgtatgtggtagttgattgatagatgctcatgaaacactggctctgggcatccttccatgtcttctgccaggtcatatttctggcactttattcaaaatgacttgacaggtcatgtaaaagctgtaggtttttgtacatatttttattagtattttcttccttgtctcagatcagtatcagaaaatagttgccgtggctcctgcacccagtctattgtttggttccaaggctaaggaaagagtgcacacaaacatgtgcaccacagttgttagccacttgtctacttgtatgtggcacccatgccacataaaacaagctcagctataaacaaaggaactcagacttctcactctcaacaccaaaatgaatatttgaaatggattcctcacctggtagatttggtgctgaaacttgttggtgaggcagttgcacggaaggggagatgggacatggccttattcatgacacactcagcaactatacatgtaagtcattcagacttctgtgtgtgtgtatgtgtgtgtgtgtgtgtgtgtgtgtgtgtgtgtgtgtgtgagtagactatcacaatacccagacgctagacacaaatattcagactgggttaagtaagcttgggtttaaatgccacaaaaaggggagcaatacagacaaatttttacacacattccggaaaagtgaatccattttttaactaagacaacttattcttcctaagggtacacagaaaagtggagtagaacctatagcatggaggcacgcctgaaatctataaacacaaactccagatcaaggaggcttgcctgaaatctacataactcagagcaaggatacatgcctgaaatctagaaaactccagatcaatggagcctgccttgaaatctacaaatcaaagacatggatggcctacctagtgggaaaacctggaannnnnnnnnnnnnnnnnnnnacatgtaagtcattcagacttctgtgtgtgtgtatgtgtgtgtgtgtgtgtgtgtgtgtgtgtgtgtgtgtgtgagtgagtgagagagagagagagagggagagagagagagagagagagagagagagcgagccagccttgctatgtagtctggctggcctggagctccttatgtagaccaggtagatcctgccttctcaatgctgggattaaaggcttgaaccaccatgcctggcataatgggcttttaatgcactttctgtagagtcattagaaacattatcttgcccagtgctccttatttattttgcatactatgcctgtctatcaacaatggaaaatgttcatctgttctcaagcagactgcaggcctgaagatcgttttcagaaatgttagaaatgttagtaaccaagctctgtggtgagtagctgaaaccacatctaacatttggaccaagcctgctctgctttcagagccctgctgcccttcatatgtgtagctggcgctgtctgtcctgtcccagcgtcctcgtctgttcttcctgactgtgtggttattgagcagctgctttgtggatgccatttgttatctatcagcattgcaagttcaggaatgaagatgcttggtcattctagctggcaggaagatagccctagtctcttcttcagttaaaaaacaaaaaccaacaaaacaaaacaaaacaaaaaataaaaatccggaaaggaaaactttcagagagaggtttgagaatttttctttgctgtgtattttttgacataattgcttttgtttcattccatttttcctaattgcagccatttagtatttttttccttcaggagaattaatgtgtgtgtgtatatatctgtctgtctgtctttgtatcaaggtgatgtcagagttttataacagaaatgaactgatgtttaagattttaagtttttaattcttttaattttaaaaattatttttaggattttcaatagatttagaaatcaataactcccctttacagttttgaggtctttaaaaaggccttgagaattttcctaggtgcccttgaatcccaggttttgtcagagcttgagcttgctagatatcttcagagaataaacaaaaacaagacttgtgtagtgtgtgagagcagtgatgcagcctcttcccgccaggagcacagcacttgcttgtgaaacagctctgggatgctcctcaggcagtgaggttgagctggagaacagcacatttcctgagcttcctcctggttctaggttgtccagcctcagcctctgtatgcctcccgaagctctcctccatagcacacagcatttcccactgcccgaagctcctccatagcacacagcacttcccacttgttcgttctttctttctttctttctttctttctttctttctttctttctttctctctctctctctctctctctctctctctctctctctctctctctttctctctccctccctccctccctcctttctttctttctttctttctttctttctttctttctttctttctttctttctttttttttttttgctagaaatgattactctgaagctcttctagtacttttaaaatttcaatgaaataaacttacatcatttcttctctcccttttctttcccatatttcctataggccccatctctcaaattcatggcccccttctaaaaacattattgttacatatatatttatatgctatatacaaatcaacacatagatgcagcctcctgggtcagacagacatgcttgtacatgtttttagggctgactattggtgtcagatgaccatctgtgggctcatccctggattctccctctcttaatagcctttcatttcatgcagctctttacctagggctggggcctgtgaaattcccccatacatgttgccatgtcacctggtgctgtcactgttcaggtcttgttaacaagcagctacattgttgagatttcgcgtcatattcagaagacacagtctttcttgcagcagacttcctggtccttaagtgtttgcctattcactgtcttctctcaggatataaaagccaaacatcctcttttcaccaccagtttggattttagggcataaaatagatgctctgtcagtggagggttcagtacagacttgttgaataaatgcatagtctgaaaatgactgtagacgtgcttgtaggagtttaggagagtcttcattccctccagagaataaatgctttagcttagcgttaaggtggctccccctcattcacagagtagatgaatgtagcttttggaaagctacactgctatttgccaaactcatcctctctgctccctgcctcctgtctgtctttactgtcagtggttggcttccttatgtatcattgcagccttctataatatggctgaactcttggggattcttacaggttctataacacttgactgagtttgtgtcagtgttgagtatgtgactgctgcttactttcgtggctaggagagcagaaattgagatggcctctgattaaatgagtggagaactattcctcttgacaaccagaacattgcaaagtggcgaactgtaagtgtggtcaaagccccatcgtgttttgtaagggccctgagccctagaagcaggacataggctgtgccacagagtgactgaatactcagtgtgcatggatccaaggttgtccactgttcagctttctctattctgtaatgaataggaagctttaacctggacttttaagtttgaatgttaagaaaaaggccttcactttctcattgctgggttctctagaaagggattcttgttttaggacttaatctttgtgagggaccttctgtattcagctgcactttgctgtctactcagtggcaactgttggttggtgttggtaacttcataaggcctaaaagtagaatttagtagtttctaatttagtagccatagttattgctagctcatgacagatgtcaaatactttattttctggggttccagaaacaatcaactataccttatggcatgcagagagacatgtagtagagagctgtagtgggtagaggtgcactttacagtaagctaggattgagttcatgttaggcctttaataggggaaaggaactttatggatctcagttttcttatttgtgaagtagagataatgctttgtgaaaggtcactgtcagaagcagacgctgtgataggcataatttgtatgcgtaattgtctgtaatacatttttttctattggaacatgtggcagtctggcatctgttgttattttgtccatataaaactaccatcaaccaatattcaaataggtttatttcttattcttcttgtttcttttctttccctttctccccattatgcttggttaggaaggaccaatgccctctaatgtctcaaaagaaacacagatagacctctatgcaaaagagtctcttactgaggtttcttcaaagggatcacaggtgaaggaatatcaagaacaagagagtcttcagtagtccctcatgtcaggccacggtggagatacagtgttaacttggcatggccaatgtcccgacatctgtaaaatctgtgttaataaaactttaatgtttttagaggtgaatgccggacaatgcttctgctagtagtttttattgttccttttacatgtaggtttttcaaagggtctactgggggagctatttcttctgcactgaaatgttaaccagaactcacttgtaggaggataagatatttagtttcttataataaatgccccccccccccgccccaattcctgcagccctccccaccccctcccgttaacactggtgggaactcctggctaaaactgaaagcagaagccatgggcccaaaaatcccatgcttgctcccactcttttctgagagatttatagggtatgtctatctttacatggagatccttaaaaacccttctcatgtgcttaggactgtccaacagcatcagcgttagttttgactcagtaaatggagccagtggtttgcaaacatcctggggttcttctcccttatttatgtactgacattagtttgggtaagggaggacattttggtttacccaagtccactaattttgtgtttaactttgcttagacttctagagacatgccatctggagcaactggtagcccaatcatttacgagagataccaaaacaggggacactttgagttttagcattccgattgtgagccttggtgcaggaatgctgatacagagtccgttgtgggagacagcaacccacatttgttgaatagctatttcttattgaactgagttggaaatgttggtggtaactggaaaaagagatgaggtctgaggagcccagtggaaaggcctgggccccttgaaactgacagcagataggtgggacaagaaacaaaaacagtaagaaaaccccactgtttttgcaaaggaatttgctagagacgttagtgtggtatgtcttctcagactgagttcttttagctagaatctttatactcttatggtaaatattgagtccccaattatgttttttctaagtttgtttttctcatttcaatctatagacaagaatgtatttgtgatgaggttgaataatattagaacatgaattgttgggggtagcttagtggtaatgtgttctgagcatgtataaagttctaggctttatatgtacacacctacacacataaaatggctatgcatgtgggatacatatcatctagagacctatacatcttgggacacatagagtggttgagaggtgaaagactgtgatcagttgctacaatgtattgatagtggcttggaataaggcaagaggctatcctttatgccttttgttggtgtgtgcatgcatttgcatgtgaatttctgcagctgtgcatgtgaaggccagatggccagtggtcagagtcaggtatctcactgagcctggagctcaccttcttagctcaactggctgactgatgagcgctccggaaactttccgctctagtgacacaccaccactaagctttaaaaaataatcaaacatttatttatttatttcatatgtatgagtgttttggctgcatatataaaagcactgcattcagtgaatcactggtgcccatggaagccagaagaggcctctagacctcttggcactggagttatggatggtttgagccactaagtggtagctgggaacagaaccccagtcctctaccaagagcagccagtgctcttaagaactgagccatcttcctagccctggacctggctttttaggtgggtgttggggatctgaactcaggtctgcaggaactagtgctttactgacgtgggggagctcctcagcctgctttctacgactttaaatgcaaagttccattcctgcatgaggaaaagggagggaaagtccacaggaaattgcaacagtcgttttctcttttcttcttcttttcctcctcctcttcttcctcttcttcctcctcttccttcttcttttttaatttctggagcaagaggaagggaatatgtgttaaaagaatgggaagaaggagtttagctagttgtgtcatctcttcaaaatttcctggagcactgacatggcagggaaactggtagcatttattttttatttaatttttcagctattttatatgcacaggtgttttgcctgtgtctatttaagtttctattgctgtgataaacaccatcaccaaaagcagcctgggaaggaaagtgttgatttggctcccatgttacaagttacagtccatcctcgggggagcttgcgtgccaggcaatgaagcagaggccgtagattgactgctgcttattggcttgctcctcaggcttacatttgacctcctgcccagaggtggcactgctcacaatggccttcccctgtgccaatcatttaatcaaggaaattcatgccagtcattaatcagacttgcctacagggacattaaccaggacaatcttcatgtatgtctgcaccacggatatgcctgatgcctatggaagccagaagagggagtgagtcccctggaactggagttagagactgttgtgattgtccatgtgactgctggcaatggaaatcaggtcttctggaagtcacttcagccctggtaccatttcttaactctgggttgtgagcggttggatagctatcctaccatgcttagtacttttcagtatgttggagatatttcatgctcatatttgtaagaagaaatagaagtatggaggtgtgatatgggttggctccctacttagcaaccagtgcaggtgatagcatattgaaaaggagctgttcttagaagctggcctttggttgatgttgtggatgtggtgtggatgctagacagctaagtgtgtgtgtgtgtgtgtgtgtgtgtgtgtgtgtgtgtgtgtgtgtccgtccttccaccccacccccatccctcttgcagactttggtgtttgctctgttcaggggaaagtctcacctgagcaaattgagtctttgtgagcctttacttttccttccccttctgctaccaatagcattccttagtaatctgagtcaggattccacccctacccccaacccctccttttattcctagaactactgatcaaaggtttcccctttccaatacagacagagtggctttctggagattgggtatttgcaggcagagaaaagggtgagggacattttgggctgtggagatagacacttcccccagggatgtttttaaaccctttgaatcggctcattgtttataagagcagtgccttaatggaaaaacaaaaaggagagaggttctgtaatgtgtgctctgctttcctttgcaggcctctttgtttatttgatttatcaagtctcaaggagttgcactgcctggtgacccttccttgagcggcgtctctggagtatccacttaccttatttagaaacataatatttaaaaaagctggaaccgagtcaaaaaatcatcaccttttgatgtggccagcttcctggggtttgaaatgttaaacttgtgggaagctttaaaagctcacttgcagtccttaatcagtaggtccttctgggtgctgaacccagaatctggggtccttggcctggggtgggggtggggcagtgcataattacaggacatagggcagaggtttggtgctaagtggtagaaagaagggacttaagaagacagtaactgggactctgggggaggcttcactttggaggtagctctggagggagactgaaggatgggccagtggtacttacgaagaagtgatgaacacagattgtgcctgctagcatcttctcatatctctggagattttaataaagctgttgaatttcttttgattcttgttcttacaaatataactgactgtgataaggactcttgactctaaagtttgaagactgaagagttcatgtcatacactttccttccagacctgcacctgtcccttgttgttagatgagtttgttgttttgtacctgatgcgtcttagcatcactaccaaagcagagcacaacgttctattatgaaactcagcagagggcaaggagctgcttacatagaccgaagcaatattcctgtggtagccttggaaaggacatgtaagttcctaggattaacagtcagtggatggtatcacgtttctgctactagatgaattgctgaatcacattattaaactctgcctcttcctagatgaaacataactcggacagaggccaaactaactccagaaactgggtaggactacaggagggtgatttactcttggaaggcgaatgggcagctttgtcatgtgcagtatgcctcttgtgaagtacacagtatggctgtttctagtaggatgtcttgtgctagttgaaggctttcatttttaatgtctttatggggtggaccacaggtcttcctgattatgtttattagcattgtggtttgtaatcttttgattaaacctaggtaatacagtggtgggatgcttagaaagactttacattaagatcaccaagcctgactcctggtttgacaagagggaaacttggggaaagagtgaattctaaaccttgactctctcacatatggaaaataagtggccaaaataatgtttaaaaatgttaaagacaatgttttctggcaggtgtatatatattaatctaagttggtgattgttagcatatgaaaagctattgacttctgggtattttcaaactgatagcagtactgaatgttttatttgtttaataattattacaccttctgtgctttctagcttagaatacagtactgtttgctagtggtaatatttccttctcccttctaatcactgttctaatcactggatttctgtcttatgtaacgaagctttttggcttcttggaaagtacgattgggagtgctcataagcatcatagctgttgactctgatgccatttttgagtcaggttgaggaagcatcttttgacttaaggcttaaatcagtactgaatattttgagatagtgtttccttgtcttttgcttttataccttgtagttttctctttactcagccgttgatctttgtatgtattctttacagtaattctgatcattgggactatgctttgttttgaaatgaattggacttttttttgttttttttttttttttttgttttttttttgctttcaactttcttagtctagaaagattcttatcaaatagggtcatctgaccttagggaatttggattaacacttctcctcagaaataaacagggcccaagtcggcagcctttactgcgagtggtgttagatgtctttacagtttcttctatcactactggattatcctagttcctgtaagtaggttctagttccttatatttaatggagttttaaagctttattgtacagactttttgtagctttattagaaagacaccgcagcaagcagttgcccccacttggcttgtgtaggctcttcttgacttgcccttgctctatgtcttgttgacctccaaaaagtttgctttggaatatagtgcttttctaatggcttccagtttactcttgtcattctcttcaactcttttatgtttcattttgttgcttttcagcctctaaaaaacataggacatgagtctacttactggactttctaaaaatatgatggctttcatgctgctaattttgttactctgtgaaatgaacattagtaacattctttgcaattgttaaacttcccaccttatagatttggaaaacaggagggtctttgtgtgtttgtgtctgtgtatgcatgcacatgtcacatgaaggcctatgtgtgtttatatccaagatgcatgcattgacatgccacgggggcatggtgttctaggtagcttatgactgaatctatcaaggggtaaaatgacatagtatgatagcctttgaaaaaactttgcctaagagctgattcagttttgatttttataatccaagaagggaaatgatcgttctgttgtcattgatccatgggcagaagaggctcctgtttccctggctaatttgctctaggacttgacgattttagcaccaggctctcacacacttcttcaccatcaggcctttctggttatgttggaagcagcatcttcttctttactcttcagtgcatgtgtgaatgaatacaaggtggcttttcttaacaacctttcatatgcttgaaaatatggggtagattgtctgaactttccctatttaatttttctcagagaattattttactttggttttggctgattttggcctttactgatcaggttttaaggtggcgattaaaacactttgctctcattaggatctgattggtaatcaacacaagaaatagttctgaaatgctgttggttaggttgtttaccttactggtcttaatatacatttctagttctttcttgtatggaatagtctggatactgttctttcttatatgagtttggtttacaacttctatgtatcacatattttcttgatgattattctagctctgttcttccagacatcccattaattggctatataaaatttgttttaaattaatttgttatttatctaggatattaggtcctcccctctttctatagatatattttagagtggtatagtttcctagtgaaggtaaatagaagatacagagatttcctagttctttccatccccccaaattttcctaccacaaatcagagtccctagcagaaagatgccattggtacatttggtgaacctatatttatagtctttatctagctaaagtctgttttttatgctaagatccactgttggttgtaaatgatgttaatggcacatgtccaccattatagtatcctgaagaggagtttcactgccctagaaagcccctgtcctctgcccctcatccttttctccactgctctcgctcttctcttgatctgagaaccactgatttccatagttttgctttttctagaccacagcatgcaagccttttggtttggcatgcatactgttagtaatatgcatttataaatcctccatacctcttcctatccttcacacctcaccttttaatactaagcagtgtttcattgaccagttgtaccagctgattttcagtttgcttcctgaagggtggtgtcatggtcacttatacattttggcagttataaatatagttactgtaaacatttttgatgttcttctttctcaagctttctgcttacataaatagcatggtgctgtcttagtagctaactttttgtcacctatatctatatctgttccttaatgtggagttactgaatccagaagtacacttctaggtttgtacatactcagaaatactaagctaatttttccttctaccagtcgtatgtgaatgtttgttactagtcttttgtaatccagtggaggaaaatatagaaatgttccaattggaggtagttttcctatgcttttgtagcagattacctcaattaagtcatttaaagcaatttctttacgtttataatttcttagctgtggaaactgaaaatcagaagtgaagatctgtgaaggctttaagggaggactcttcttgcctttggggctccatctggggctccatccttggcatgcctctggcttctgcctcttgtaggtgaactacctgtgactctcttgtcaaacagtgttctctgctctgtgtatatatgcgcatgctagcttgcttttattttgtgtgcgtttgtattgaggggttgagaccgtttcactatgtagctcaggctggacttgagtttactgtgtaatctaggctagcctcgtacttgccgtgcctttcctgcaaacatgggaagtacaggtcataggcatgtgccattatggctagcataatagtggtatgtacgcctgtgtgtgtgtgtgcgcgcacgcacatggtcattacttggtttaggctccaccatcgctcagtataacttcatctctacatactacatctacagagatcttgtttccaaataaggtcacatgctgaatttcaaaatggacatggagttttgcagagaactatttagtccagtatcagtatcttggactttaaatattttgtgattgagttttaaaagtagtgaaatgctagcaaagcagttagagccagatgtgtttgggcacatctgtgatcctagctctcaggtagttgtctgaggctggcaggccagcctggattatacagcaaggccccaatctcagatatcatcaccccaagccagtgaacaaacaaactaaaggagaagcagaagcatcgtgaaagaagcaggcagagcagttggggtgctgctgcgcccctcctgttgacgtcggcttcagtgccaagcgttatgccccttctgagtgttttctttgttgtgaattcatatatttagtcattagtcttatgtatcagcttcatcccaacatttacagagtgcaatatgggcttgcttagcatagtttcctttattacactgtcacgctgttccttacaataagaactcctttgttattgtgatgcaggataggtaagaaatatttgaatgttcgtgttaattacttccagttctcaaatgtggatctggtgtagaaccagttggagcaaatagttcagcagtttacacctgggatgtttgtctagggtgcttcagtcagtgtaactcgctcagtataagagatatgttccttcaaatagctaagatctgccatctgcaaaaggtattatcccaccgctctggtgaaccgcctagccacagtgctattcctcagctggcttccgcctagccacagtgctattcctcagctggcttaattgccccatctctgtgtcttcctttggatggctgtatagctttccagtttctttcttcctttcttcctttcttcctttcttcctttcttcctttcttcctttcttcctttcttcctttcttcctttcttcctttcttcctttcttcctttcttcctttcttcctttcttcctttcttcctttcttcctttcttcctttcttccttccttccttccttccttccttccttccttccttccttccttccttgcctcttggtagaacagtgttgcttggaaaatgtcagaaggtatctaaagaaccccttccccaatctcttcaataacacacacacacacacacacacacacaccattaacaactttggtgttttgtttttgtttgtttgtttttttttcccatacatcttatatcagattttatggttgagaaactataaacatgtttggtgatcaattatttgagtggtggagggctctgagggaagttgctgtggttctgaaagtggctgggcttgtttcagacactctcttctgtaacataaacctatggttttcatggagctctttggttctgatgaattgaaccacatcataaggccaaatttcatacctgggattgctgatgacatgctcaggcttgttggatcatttgcttaatgcatggtgacagtgaggctaaattcttagtcattgctttgattaggcccctaccaggcttggagtgtctgctgcttatgacaggcagctgagcctaagaccccatgacagcacagatactgagtagacagggcaagccaataagcttgacttggtggagatggcaacccagaaaatagtcctgaatgctgctgctgctagtggtgatggtggtgtgtgtgtgtgtgtgtgtgtgtgtgtgtgtgtgtgtgtgtgtgtgtggtggcttacaagtgcaaaaagaaagtaggatgtgtaaacttctcgtatgcatttctgaattctttgagtgggtactggaaaagatgcaggagaccatgactgagagcctgggctaagagaacagctcagtagcttagggttggtggtggaagaatcttttaaatggctcctgaaccttttcccacgagtcaggggaaaaaccaaactaaaccaaaccccccccccccaaaaaaaaacccaaacaaacaaacaaacaaagaaaaacacaaggagatattctactgagaattgcacttgtagatttcaatgtgtggattttgaagcactcatgaaacacaatctaaatcttaaatagtgaaagcattttcatgtgagctacagtaataaagttaacacttcaggcaggtgggacccattggcaccgggaataaaggtgctaggtggatatggcttttcggtgggctacctgtttgtacaggtagggtgggagccagtttatttctttgccagacatcttaagtactgtagcttgtacttccctagaggtaacaaggtaaaggttaacgtgcaggagggttattaggtgtgcctctgagatctacacttggggaagggaggaagagcagtatgttaacaggcaagttcaagatgcaatagagttgccaggccactgttgctggtatatatgaagtatataccacatttcattcctcccttcatcagtggaagcaatccattgtcatggtgtttgctgtacatggagcaaagccagacactgttctgagtcttagaggttgagatctgagtcagacagatgacatccctatagtctaggaggagccgggacttctaagtggaagatgataaataagacagaggcctcagctccaaaatgatcaaataatatgatggctggaaaaatattggtggggcagtaactgactgatggctagagatatcaggagtcagaggcaggggaggacttctgagtggaacatagagcacccaggaacaaagggagtgtgttccagatcagaagcagagagtgggtgcatagagtgagtaaaggtgaaaggagacaggaccaaggccaggagtttgggctatttctaggaatgatgagagttgttagggaatttgaaagcaggcaggagccttctggcaaaggcatttcttagacagggtttaggacatgctcatccagtgttttgaatattttatgtaattaatttaatccctgataatcctacctagaattcagtcttcgtctctcgcatttatagatgaggtaaccaaggcactgggagttttcttaatgactattctgagaccacagaagggagctctgggatctacagaggaggtctggctcactgttgtttccttctgccccctaccccctgatgtgtgtacaaagatagcccaggtaagacttgaggaacacagcaccagtcaggagtctgtgacagtgggttctgtcctggaaataggtagaagatgggcacaggctgcggtgccgaggtgcagtttgattatgtggtgggcaaggaacacgaaagaagaatagaaggcaagtcaggttcttgtcatgaacaaatatctaaaatgaacataaatataatacagtggatcatacatgtttttcattcaagagtgatataggattgtagagaaattgttcagttatcagacatcctttagtgacctggaggaaaaactaaactaacttttctgaaggaatatggatgcctagccaggagtctgtttgatgataattgttgtgttgttagggaatttgagagcaagcaggaaccttctagaaaggcttctttcccctcccacccagaaatccttccttctccaagactagaatggcctgaacccttgctgtggtctgggtggggtaagatagagtaatgacaaggtgcctcaggcctcttcaccaccccctccccaaacagcagcctgtacagaaagctaattagcatttagcctgttgccgcctgttctgatgctgcttgccagcacacacttagaggcagttctatagactggcaccgtaaatacggaggtgttcacaccgtacaagatagaaatgctgatgttcagcagggatttggttagaccgtttcccaaagcattaatccctatacagagagcatagtcttttcattacactggagcttcaatccaccactgaaagaaagttggttcctagtgctagaggtaggggaggaagtatggcctcctttggagaaactccttgtgaagaattatggtaaggaacatgtctttacaaagcccgctgttattattttaacccaaggattatgtagcagaaaattggggactatttgaatagttttaggtggaaaaagaagaaaagaaaattaatgtctagttaagtttgatttccccaccttttttttttcccttaaggctgactgtccaacttgctaatcattagccagattttgctacatattatggtcaaatttaaataaattaagagtgcatcagtgaaatactagtcatattagctggttcagaagaactcacttcctctctatgtggcttctgagtggagtcagttgtaggttgtgttcagagcgtataatctgagatgtctgaaatcttgaaagtgtgtgcctcagtgacctagggttgaaagggtttgtgcagaaaggtttgccgatggatctgaacacgagaacatgttacttcatctgtaaagctaattctgtaacctgtaggctggaacctggcccaatccagaggtaaaataacaattcctggaacgctgtgtacgcggtcatttttctagctggttagtgcttgtttttgttgattaagatgtgtggtactgttttctaagcacttttacatgagcctttctctgctgcagattggtacagtcatctcggaggaatgcagtgtggggtgacggaatggttttattatacttaaaaatcctggtgaaagatatctacagtgtcgtgctgggagagccgtatgagctggtgcttggaaagtttgcttagacttggagtttagatcctgttcccgttaagatctgtgctctgctgggcctcctttggcagacagtagtatttgtagtgtaatgtgggaagttataattggataatccttagggaatatctgctctaggttataggagttggccaactacagtttggggcttacatctagtcctttgcttgtttgtataaagttttattggaacatagtcactcacacccattcatttattatagtctgtgacccttttaggcctactattgcagaagtggagaatcgcaactggatggctggcaaaactgagaatgctcttttgccaggaccttgtccagatgctgtgtgagtgattggcctctcctggttacgaagcagctgtgtgagctcctctttacacaaaaccttacgggagcccagggtgggtgggttccctccctccctccctctccccctttctttctttgggtgggcaggagagctcaagaattacagtctagtttgttaggcatctgcctcctcagctctcttcctatgtattgtcccagagacccatgtttctgcatctcctcacttctccatcttccctgcttctttttccactgatgaccttactttctgcttttatgaagtaaattgatcctgaaggaagagaagcttcaccacccaccacccctcacagcctcatccactcaccccgccccccaccccccaatgctatcccatcagtctacacagtgaactgcttggctaccatctcgagccagttcctctaaattcaccaggtcctctctcctgttgtcctaaggcagtcattccagccaccctagtttctccattttctgctactatatcaacataaaaagagtcctccacgtacatgaaacttacatttggggtctggaaagaggacatcagtcaagagcacttaatgttgttagagaggagggagccatgtggtacctaacaactgtcccacacttcctctgatttccatagactcatgcttgcatttctctctctctctctctctctctctctctctctctctctctctctctctctctctctctctcccacacttcctctgatttccatagactcatgcttgcatttctctctctctctttctctctctctctctctctctctctctctctctctctctgtctctctctctctctctcacacacacacataaagtaaatatttccctttaaaaagaaactactactccatgaacttattcactcctattgatagctactcccatctttccagcacagctctttcagagtcaaaggtcttccttacttccatcttctcttaccacccatcctcccccccttcccttctaaacccactctatcttttgacctcatcgcttgtatgtgccgtctgctttgtccatccctcagtggtgctcagcttactcagtcctacggtcggtcttcagttcttggacttgacccatcaggagccctgtgctttgtcaactccatcctctctctgctctctatgtgtgtgcttggcagccctccccctcccttcagctaccatttcttctgttcactatcttgtaagtgaatgttcagtgtgtggccctaatctttggctctgttgctctttggcactatgagccagtttagggattgaaaataatttgctttgttcacacctcacaccatttctcatctttcttctgaacatcagggtaatgtcagttgtcatctgtgcattacctgtgttctgtgttggtgtctttgtgtcactattttggaattggggggggggcgtccagtgatatttcccagactgatatagaacactcaggctcaagtgatcctcttgctccaaccaccagaacagcagagactacactcgtgcacaccatgcctaactttcaaagacatcctgagctcacattgtctctagccttctgaaggtttttctgctgctgctgcttctcctcttcctcttcctccttcccttcctcctcctgcttcaccttcttttttgtctagttgttcagccatttcttctgaatattagaattgtgttttctctcttgatactctctagcacatacttgcacccacacatgcacccacccacccacatacttggaatttagattatcagtaaatttcatcttaaagctaaatttttgttcccatcactgattatgtgtcagagatggttttttctcttaaagtaagagttttggatcaaaaactacactttaaggctttggtccatactcagaaaggttgttggcatttcacctgcagtgtgtttggtcagtatagtggaggagatggtagcagtctgtccagtggtggtttactcagtctttggtaacacatcctgtaaaccatgtctttaagctattagtttaacacataataggaagttaatgtgtatttgttgagagaatgaaggcgccctagttcagtcaggcagaatccttcagtgtgcaaataaagggggtgtctctcccttttcctgagaggggctgatgatctccagcctcgtctttgagtaatatttttattttacttttctccaagtggttggaatggactgtgtttttgaagacatgccagagtggccaggactatgatttttatggcccatgtctctgccttaagatgtttctcagtaaatacaggactaaacacctgcacccgtggagcctgtggttcatgcccattgattccgctgtaaaataaaggccagcagaagctgcagagatgaagtctagttaaccttggaaattcagccctttctgtgatgaacatttctcctggttgtcctccctggacctttctgcccgtggtgggagactgctgctgcagcatgtgctgcctatgtactgcctctggccgccattgtcttgcctgggacacagctgctccctccttagggccaagaggcagggccgaggggcattttattctaatacttcttgcttgagcatctaaaatctgtatgaaccagtgcttcatttgattctgttctcttgctcagcaagcagccgccgccacccccaaccccctatcccatggagagtggctttcccaaccctgatttgtgtacaatgtgcagctcactgatttctgaagtgtgagggatgtgtcttaagcaaagcttcattggatattatgttaacacccatgagtctgcaatagttcagcactgcgtgactggatagagtgtgtccctttgttgtggtgcactccattgagaaacacacaagtgttgcacctggccctgctcttactcggggctttttaacagcaattccctctgaagtctgtcctttccctcccctatccattgatacccatcattcttctatcagatacagtagtgtgtgtgtgtgtgtgtgtgtgtttgtgtgtgtttgtgtgtgtgtgtgtgtgtgtgtgtgtgtgtgtgtgtgtgtgtgtgtgtgtgcaggtctgctgcctgtctgtctgtttgcctgtctattcatgtggagtccagaggtccatgatacttgtcttgctgtatcctcactacctcacattttgaggcagtatatctcattgaacccagagcttcctaatttgacttgccttgctacccagcatgctctgggaagctcctgtctgtgatttcctgcattgggattataggtatgtaccacagtgacaaaatgtgtgttttgggtgctcaagctcaatttgataagcaaactcttaattgactgagctatcttatctgcctccgatgtagcattttaaatatttacatgttatgtcctttagaatgtagaagtcaatagaatccagtgctcagctgcttgcattttagtttgtttatcttgtgtgtatgagtgtaggcatacttgaatacttgaatatctgagtataatttgttgcagtctgatctctccttctaacaatcatggtttgatggccccaaaaattgtgggttcaggtgtgtcacagcaatctgggtgtgttagtcctggccctgccaagtgctggctgtgctttgtgcctctttatgcctcagtttttctcagactgtagactggtgctgctcacggaccctggcccttgtttattcctcacttgacctctttcctttggccgaccaatgtccattgggagaaaatattctctcagtgtgaaatctagccctctttatgtgcaggttattttgttacatttttcttttctatttatttgttaattaattattgattatttttgttttttatttttgtttgagcttctgttgtggaattttcattctttgttccctctgtctcttacactcatttagctctgtaggggctgaaattccttattattactaatttttttattactcaattgagggactcttgaagtctttgctgacacccttcctaacctctcgtcacacagttcccactattcccatctatagtgcactgaacatggcttttcccaggggcctggaagccccctcatggtggaaatggattcttagcttctgtgttaacacctttgtgcctaggaaactgttgatgagtctgcttggccttgacttttgtaatctggctatttaggagcctgtgggcagagagaggagtacctgggctctttcttaagccctgggagcatcctgaagcaggagctaaggagtgtgctattcaagcagatgattggtttccttcctttccctaaggatccatcgcagagagggtttaagctcgttcaagatttggtagaacatacctttatggaaatactcactgaattaggttttaggcctttttttcttttcctcaggctaaaatagaagattagcatagacacagataaagtgagcagactgcctaggctaagctcagacaggagcctgctttctgagcaggagatggggtacggccttccgggcatcagttggcaggtgtacatgcctgtattgtttctaagtacgaaagcatagagggaagggaaaagagtgggagaaagggagagagggagacaaaagaccaacaggaactccatgttcacatgtgttgttgccatgaaggattttgtgtacttaaacaatgctaggacccatcgggacgcatcatgcggaattgtggagggcagtctctgcacctctgcttgggatcttgtgtctatgtcttgacgaaccttggaagatatctttgagtagtccttgtactacttgtgggtcacacataatggtaatggtgctgaataaatattcgatcaaattgaaggctgattggctaaccccttgtttgtcactgtctttgtgtggccatctttctccaccatcatgtgacttgtaatcttgttgacaaattcaatcagtacaaatatgggggtggacctgaagactgtgccactcaacttatgcaatataatccatagatgtgagcttattaacctttgactttgttaagtaaatttagggaacgttcttgctttccctaagcttttgttgtttttctttttatattttatattagcaaaatgagaataataatgtatgtgttgaggatttaaggatatcaaatatgcagaggggcttgtggtttgacatgcagtagctattcctggatatattcattatggtatacaactagaatcatattctcatatagcaatctatttttaaacatatcctttctatatatattttataaaacataattcagattcatctatttttataagccatgttcctatttcctgtattttataaaatgaaacaggattgcaggggtagactttgtttacttagcttgtaggacacaggagcacacatttcatacactgttggcccagtgagtgcacttcctttgtattgacctctggcgtgacaagtacacagtgacatggccgacacacagctgactgaagatcatacatgtggtatgcttttgatcagatagtcacaaagtctgataattcacaaagtttcatggcgtactgatatcagatagcaggctgcataggcccagatcaggtgagatcccttcacagacagacttcctgtcagcatgggttctgaggctatgctgtgtggacatctatgacatgctgcttgtgtgtcctcttttccccctcctggcaaacccactactgtctccatggcctgcagacaaggaaatgcactctcagagttcagtgtctggcatgagtcctgtacagtggctgccaggtcttgaaccctggcagtcatatggcatgccctggctgtcaccctctgtgtagcctggggagaggttgatgaatacagtctatcaaaaggagctgtgacttgggggatgaaagaagaggtccgtgaacacacggatgttcttttgttagtaaattttgccttagttgtttgctatatgtcagggaagagccactgtgaactcccagtttctctggcagagctgatttatgaggattttctcagatcttccagcaggttaacaacgtggagtcttgaaagctttcaagaggggaaatgaataaacaggtatttgaggtgaagccgaccaagtctgtggagctgcagaaaggtgaattaaatccgttgaaaaggcttggataagaatttcacatgtctcttgacctagtaaatgagagtcaggaatctgactttgtaggtcagcttcctgattcatgtagatagaacttgttagaagaagttttatttggcggagatgttacatggctttagtggactaaatcagtcaggaaaaacaaaatgaactgtccagataaaatcagctgagaggcaatccttacctcacttttaagttgaattacgttgcccctttgacatttttgaacagttataatggttatattttgcattctatcctgttcttgctttatacatattcatgttttcttttaatccatagaatacctgaaactatgttacactgagttttttaaaagacaaacaccagcaattgtttactttctgtggcctgttttggccctttggaagtaatataaaacacacgcgcgcgtgcgcgtgtgtgtgtgtgtgtgtgtgtgtgtgtgcctgcctgcgcgcacgtgcatgcatgtgcaagtgtatttggtagaattaagagtgtgtcaagatttctataatctttcaagcactcagaaacaaaaatttgtggtgaaggtcaggtatgacctgacaaaccgagactgacaagctttggtttttttttttttttttttggggggggggattgtgaaaatgtccatttttttccccttgtttcccatgtcacttggcctgtggagttaacaggactcttctgaggaccagtggctgcattgctgtggatggcactcctggagttttccaaaattcttttttcctcaggggaatgagtgattcagaacatcatttgtaaagttccaggctttgttcttagagttttctgacagtccatttgtattcattattgatgtattcaaaactcgtgaaaggagcctgggagattgagaaacatgcttataagcaggataaatgagcaacttttgacagaatctaaagtgcccaggcatcctcacccttggagggtctccaaactctgccaagggctctgcccagacattgcacaatgtttgcagaggtgggaattgatgacaaggaaggcagtataagatcccattggcatcatggtggtctacccaggaaaaagttggttccaatacgaggaggggaagagtgtgaaaagtgttggaaagtgagtgtctggggctcttcagttgattgtgtagaacagctcatacccatgtttgttcccctcagtgaggttgaaccagcctgattcttaatgaaggctccatctctccatatcagccaggcattgggtattccatgaatacttaccatgcctcttttccagggagggtgatgcatacgagcattaagtgttgtcttgacagtttgacttgccaggaagagaggagtaccaagtggaattggctgaattcctagtccctgaagtcagggtgcagctgtccttggcaagggtgctgtagaccttcatgcaggtctcttgcccgagggtatctcttttgaaggtagagactagtaaatgtctttcatgttttggtgcctcagctttcacagacacaaaaggtgtcacaatggttagcgttcacaaagctcctgtgagaatagcagaaatagaaaagggaaggtaagactctccacagttactgggttagaaagaagtgttactctaagtggtcagttgaattcattttatttaaagagaactctgaggtctactgctactacaccacagcccactcacaggcgacagttttggaggtcatgcccggaggctaagttaggacagtggagaagccttggccttgggcatttgtcttcgttcgatttgctttgctgtgataaacactatgaccaacagtaccttggggaggaagagtttatgtggcttacatgtccaaatcacagcctgtcatggaggaggtcagggtaggacctctgcaagagctgaggcaggaactttgtaggaaagctgcttactcaccatggcttgctcagcttgcttcctatctaacccagacctctctctctaacagtggcactgctcatgcggaccatatactcacatcaattactaaccaaggacattcccctgtagatatgcccgcagactaatctgatgaaaatatttctgtaattaaggttccttcttctctagggagtttgtgtcaggttgacaagctaacccgcacaccctccaaggctacaacaattgctcagcctgcaaggagttccttggagaccaggatagagggagtgggacactggaggagaattatgtgtggaataattttttgagatcatttaatatattataatgccttctcactccctaaatatgctggttcagagaaacaccatttacccagtgcctttgggggactccatgtcaagtccatggtgaccatgcatggtggtaatctacatccttaactgtgggctttggtgagtctgataggacatgcaggatcacctttcctgtgtaaaaccacactggagatctagcccaaaggagagttagatatgaacagcagatgtgagtcctgcagacatgttcttcttggggggctattaacttgcttttgttcttagagacattaggatacctgtttaatatttttggaaataaaaggatgccccttttctccaaggcatcattgaaatgtataaagaagttgagtaaaggcagaccgtgtctcagtcctcagtttcttccctcctgtgtctccagcctccattatgggtggtaatggcagaggttttctgctggtgccttagctttaacatagcttttggaggaacctttggagactggtgagcgatagagaatcattacagcccactaccaaggcctgctgtttccagatatctgttttcctctctttacattttccttgtcctaaaatttgaaaactgttgaaaaacattggaaaaaagaattacagataccccactctccgtggaaatataaattgttaccattgtatgcatttccttttaataattttctacacatgtgcacacacaccattatttggacacagtgaggaggactgggaagttctttcagtttcatcccctctgtccttacattcattatctcctgcctagttccccttgtagaaaggaaaggttttataaaatcttgaagattttacctaagaagaaactagttcaacttacagaaggaagaatagttatttagtgacacctgtgacagctacttctatggtagaagacagtgaaaggacatcgaatccagagttctgagtgaacttgaaaatgccccagtcaaggacgccttttacacctcctagcagctaaggcgagaagcagatccatcactgtggtgactccaggaagccactgcaccgatgtgagtgtcctcttcgtgcacagggagggataagtgcacagccagccactagatcgtctgtgttgtcgctgcagggagaagccaaagctgaatcctcctaggttatgtttttctggggaattgggttggactggagtcagctcaccaagctaattccttcttcccatctgccacaggggattaaagagaaaatatatactcaagcaaatgctagattgtggcagttggttactggctgtagccgtgttggcatcactcatgaaccacaattcttctaaacgacccacagctttctctataagaactgttatacttagtctcgaaatggctctgaaataaacacctttatttctaaattgaagtcttttattttttttctttaaatcaggaaatacagcataattaacttttagagacagacttccctaccccagtccatttagctatggggacaaagatgaccttgaagttgtgatcttcctgcctctgcctcctgagtgctgggatttcaggtgtaccactatgcttgctttatgtggtggtgtacacggagccagggcttcatacatactaggctagcactctactaactgagctacacccacagtcttctttctgtttcactgatgttatttttcacctattgtttgttaattaggaaattgataatctgcattataagtttggtcttcagcaagcatcggtgtagctaagagtctgaacagaatgtacattatttgttattccaggtgcctatctggggaggactgggttacttgggcatgtgtctgagagggcataggtgtcactacactgtaaattcaacgttaaaccttttgatttggtattaatgcagaaaaagtaatgatatttcagttctactgtttatgataccgtgatgtgaaactaggctcatcttgttactacattcaccactgttcttcagttatttggctgtgcatgccccacagcatttaggggattttgttatggaatgacattttgttgcataagtgtctctattgtactttgtaaaattgtaatgtggcctggtgacaagagtctataatcttggctgcttgggcatctgagacaggaggatcatgcatttgaaatcaatctgagctatagagagtataaggcagccctgagtagctttgtgagactatatctcagagtgtccagctcagcctagcagacatgaaacctggggtttattttccaggatcacacatacttaacagagccatgaacctcatttttaaggaaggtgaactttgagaagagtcataatcttatctagatgaacatgtatccatggagcaatactgaaagcattaatctctcccttagacacctgacttgttaggagtgaagcaaagtaggtgcctgctacttgaatcttggaactgtcttaatctccagcatgtaatagcataataaatgtgttgtttttgatttcttgttttttttttttccgttttgacactgctcttaaacttcacacagtcaatgtgtagtggaaaatgctcactgtcttgctgtataatattcctttttaagatgctgctacaaattatgaatccatcctactgttgatgggtatttgttggattcaagttatgtagtatgaaggctgctactgcagacatcctagtgttttagtgcctctggtattcaggatagagctgactctccataatgtctaagggctgcatctttgtttgcttccactaattttttgagtaaagagcaatagggacttgtaaggaaaggcagtttttttgttgtttgtttgtttttttgtcttctcccctccttccttttattttattgtgaagaagagtaatgacgttttcctaataaggtgccgccttgaggctgggctgtgtctcagtgaagacactgctaatatcctgctatcttcttccttattacttatctgttcttcctgatttccctactacactgaggcatgggacgtcttaggaggacgggctagactggctttcttgtctataaacaacctccttagattgctagtttaatgtgaagcacatctatggggtaagaggttgagtttaagtagtgtgtacacatgagacaggtctgaccaaggcaccaaatctatacagtgctgcattgttagattaaataataataataaaaaaccaacaaaaggcattaactttttttttttttaacaactgtgttttatcagttttggagctccactcattctaggttttgagcagatgtgagttttaaagtcctgtggtaaattcagtcctcatcagagataaggtaagaggctaagagttaacaaagcaaatgaacagcaccaccttcatgtcccacataaaattgcccttaaaaggagtggccaggcagggctacctttctttttctctgtgtgtcctagtatcccttagtatttgtagtgagaaagtcttagtcttgaaggtgccttcttttgctctataggtttggctgtatctgtgtataaaggtagccagtgcgtcacatatggtggccacactgagtctgatgaggaaaggaggccactgtgtgctggtacatctccaattcaaactatgaatcactgcatgcttctttcatgtgcatgggctggatgtgaatttccacagcagctcccatgagtatcggacagataaaacattgatgctagaagaggtctgcagcgtagtagttcttgtctatttttcttgatctttctgttattcactccgtgtccatctctttgatatactttaacatcttatctgccagtaaattacattagccttaagttggtgaatagaactggaatgttcttgaacagtaatctggaagccattaaataagagcataaaaaaaaaaaatcaaaatcagaactcagagttatagtcagtgccagagcataaagttctggttctatccccagcactgcaaaacaaaccccaatcctgataagatgccagcctagggaacttgtgaccttgctcatttgtttcccctcctgtttggagttagatgctttcactttgggcatcagcccccgttgtcagggtccctaagaacactcccgcatctttgccttaaagcctgatactaatcatagggatgcctgttgctgcttatactgcctcaagaaactatcacacagcaccagggtctttaccccgtcttctccatgcattaatcttttcatctttggattcccatggagagcctgcttttactgtatgttaagactctggagctgagttctttccccagtcctcatagagctgcactgcactggtggaggtgtgcagtccagcagttggttaggaaactgaagactgctgggctcagtggctcagaggatgcgtggaggggctcctatttgagttctgacactagtaaagcattttagagttggccttgtagacacttgggcttcccaggacattcagctagagaagtgactttgaagcaggactgtgaagagtgctgtcttccattttaccatcacttcagtctcaagtgctgtgtgaagagtttgctttcggactcaaaattaagacaggatcgaggtggtgtttgcattctcaaagcatccaggctgcagtgtgttggatttttctctgtggtttgaaaccatctttgtaaaatgaggttccatcttttagatgtgtcttccagaatattaatgtactcagttttcagatcaatggatcacgtgtaaggagtcttttaagttccccttttaaagtagggggagttgaaggctagaaacttaataatgagacaagactgaggcacaccccagggtggagagagactcccaaagataccaatattggactgtgatatggtatgataatatgttatttatgtctttgacctaagcacttaaatcaagccaatccaattttttgtttgtttgttttcttatttttaagtgtccttgtaggaaatcagctttgtttcaggggtagatatttttgacaaagtcatttaagaaagaaattaaataaaatttcttataaccccagaaactctgatacattgttttagctcttagaaccttcagctgaaaccagacagttctcaattgttcgggagctggttttggcagatttgttctttttcactataggagggctgctgtaaagctgagagttttcagcagacttggaggatgtcagagcgatttaaaagttgggcctgtcaacctttcttcactgctttctcttgcaaacatgaacatgcttttagaaacagatttcatatataaaacaaaacttttctttagatcctttaaatgtaaatctgacttaagttttaaaacctgccctgtttagggcagaagaacttttagtacttattcttctgcttattttaaataaattataacatattttcccacactttgttcccctattcccacccccacagtacatttcaagtttatccatgtaggatcattgaaaagataaaaggatgtatgattggtaaagatctttttcacaatttgttggctgctgttttgttctatggacagtgtcctttggcttacagcagctttgcaattttatgaggtaccatttgtctattattggtcttagagcataaatcattggtgttctattcaggaaaatttaccctgtgcccatgtgttccagactttttcccactttctcttctgttagtttcagtgtatctggttttatgtggaggtccttgatccacttggacttcagctttgtacaaggagataagaatggatcaatttgcattcttctacatgctgaccaccagttgatccagcaccattagttgaaaatactgtctttttttcaactgggtggttttagctcctttgtcaaagatcaagtgaccataggtgtgtgggttcatttctgggtcttcagttctcttccattgatctacctgtctgtcgctgtaccagtaccatgcagtttttcttactattgctctgtaatacagcttaaggtcaggggtggtgattcctccagaagttcttttatttgttgagaatagctttctatatcctgtttgtttgtttgtttttgtttttttaaattccaaatgaatttgcaaattgctctttctaactccatgaagaattgagttggaattctgaggggattgcattgaatctgtagattgctttcagcaagatggccattttttactatattaatccttccaatccatgaacatgggggatctttccattttctaagaccattgatttctttcttcagagacttgaagttcttgtcatgcagatctttcatttgcttggttagagtcacaccaaggtattttatgttatttgtgactattgtgaagggtattgtttccctaatttttttttctcagcctgtttatccaatgagtaggggtaggctactgatttgtttgagttaattttatatccagccactttgctgaagttgtttatcaagttaaggaattctttggtggaatgtatacaaaaaactcaagaagttagactctagagaatcaaataaccctattaaaaatggggtacagagttaaacagagagttctcaactgaggaatatcaaatggccgagaagcaactaaagaaatgatcaacatccttagtcattagggaaatgcaaatcaaaacaagcctgagattctacctcacaccagtcagaatagctgagatcaaaaattcagatgacagcagatgctggtgaggatgtggagaaagaggaacactcctccattgttggtgggattgcaagctggtataaccattctggaaatcactctgtcagttccttagaaaattggacatagtactacctgaggacccaactataccactcctgggcatatacccagaagatgctccaacatataacaaggacacatgctccactatgttcatagcatccttatttataatatccagaagctggaaagaacccagatgtccttcaacagaatattggatacagaaaatgtggtacatttacacaatggagtactattcagttattaaaaacaatgacttcatgaaattcttaggcaaatggatggaactagaaaatatcatcctgagtgaggtaaaccaatcacaaaagaacacacatggtatgtactcactgataagtggatatttgccccaaagtttgaaatacccaaggtagaattcacagaccatatgaagctcaaggagaagaaagaccaaagtgtggatgcttcttagaagggggaaacaaaacactcatgggaggaaatacggagacaaagtgtggagcagagactgaatgaaaaaccatccagagactgctccaccagggaatccatcaccaatcagatactaatgtagatgctgagaagtgcttgctgacaggagcctgatatagccatctcctgagaggctctgccagatcctgacaaatacagaagcagatgttctcagcaaaccattggactgagcatggggtctccaatggaagagttagagaaaggactgaaggagctgaaggagttttcaaccccataggaagaacaataatatcaaccaaccagagccccccaccccgagctcccagggactaaatcgtcaatcaaagagtacacatatagggacccatgtctccagctgcatatgtagcaaaggatggccttgtcaggcatcaatgggaagagaggcctttgttcctgtgaaggctcaatgccaatgtttagggggaatttcagggtgggaggtaggagtgggtgggtgtgagaacaccctcacagagcagggtatagaggggttaggatagggggttgccaatgggaaaatcgggaaatgggataacatttgaaatgtaaataaagaaaatatcctataaaaaaagaagaggtaaaaggaattttcaagaatgtagaaattctgtattaaagccattcaagtttgagtcatagaaaaggagaggcaaaacgaacattcctagccagagtgagggaagagcaagctagggacaagcaaaggaaccattgactgtccagagagcggttcttaggaacattatagaaaacttattagtccaggtcaagccacacagtgttaaagaggagagacccagggttagggaagtggtgggtttggtcgtattttgggtcatttatgaggtatgtgacagggaagactgcagcttagtttagtgcaagagatcgccatggcaggatcagtgtttttggtagaaagctgtaagttgaatatatactttttacttgtctagaaacacagttctgtggtgtagttgtgaagattatattacagaagtaagagactccttcccttctccctaactcctccttccgggatggaaattaaaagggaaatcaaaaccagagcttagaaaggcggcttccctctggccacactgggatgggttgtgatagctgccaacatgctgaacatgcccagaggtacatgctgtcgttttgtagggaagggctgtgacatttgatgtctggactgtacctcacatcacacactaggccagaaggatacaatagaattaacagaattgtcaggagtaataaaatcatgtggattatgtgttttagttgctgtttttgccagctcttcttgagaactctggtagaactgcaccagacatggagattaagatagaagaattcttatttgaatggcttggcaggaacactgtgtgaaattatgtattattattcccctgaacttaaagtctttctgccaagaaatgcaactttccatttgtgtcaagaagatgtgaattaaggattaaagaaaagtgaaagaaaacacagatgatctcaacttaaaccaaagatgcagtgttgtggattttcagctgtaatactgtaccctggggtatggtaatggttaggctgagattgttaggctgagattgaccaattcttctataatttgtccttgagattttcctatattgtcttgtcagtgtctcctctaagatccttatttgttacctgagtcctctcccctttctgtccctccacagttaccttactgtcttttttttttttttttttggttttcttattgtacaagtacatgagtcgcagcatagtggccattctgtttccatgccttagaatggtgattctcaacctctgagaggttaccccttaaagggggtaggagggtttaagcgaccctttcattgggatctcatatcagatattttcattatgattcataacagtggcaaacttacagttatgaagtagcaacaaagatgattgtattgttggaggtcaccacaacacaagggagtgtattaaagagccacagcattagagaagttgagaagctctgccttttttttttaaagatttatttattattatatgtaaatacactgtagctatcttcagacattccagaagagggtgtcggatggttgtgagccaccatgtggttgctgggatttgaactcaggacctttggaagagcagtcagtgctcttaaccgctgagccatctcaccagcccgagaagctctgtcttagtaggtcaggttttgtgctgcatggaatccctggcatgggtacagtgtcatgagcgaactggagaaggtccactagagccagtctgtcctgatgatgttggtgagtcctcccttgaaatgcaggagcagcgttcatgcattggaacccttactgcacatgtactttgtctaactaggaatctccaggttagtgggagcaaaaagtctcaaaactttaatattgtatttcttccctgtcttttgtttacaaaggtatatgctgacctaagttataagatggtcaggtttagaatttttgagagcagagttgatccctgacagaacagctttatgactttgggagagagtttatttctccatctatttccttctctgatgatacgtgatgatattaccatgacctcaaacttctagcttggaaacactgttggaagttctttgcaaatggtagttgcttccttttttttttttttttttttgttttgttttgttttgttttgttttttgttaactactagataggatgtatagcttcagtgaagggtatcgttagcctgccttgagatgattacatggaggagaattcatattctgcaaaagtccagtcctatttgggttctgaatgccccctaaaggcctggtgcccaggttggtgctcttgggagatagattgtcccctaaaggcctggtccccaggttggtgctattgggagattgtggagccttgactaggtgggaatgactgggaggttttcagagcaatctcacatggggtgataggatgccagacttttctttctgcctcctttgcttcctggcatgaggtcagcagttttgttgtaccatataccctgccatttataagatcattctttgttatagacgcaaagaactgggcagggtgaatcttagagcagagcctttaaactttgagttgagtatttgctcagctactccagtgacagaaagctggtgtccccctaccattctgtggttgtgcagatgacttctctcctactcctgagttttgctgtcattagcacaaacttgggccttgacagtatgaaaatgaagacaacaggatatgctccattaaaaggaaggcccaggattaggatagatgaattcgcctgtgagagtccatgccctttcatatgggttgccaccccagagaatggcccagatttaagactttccagtcagtctgacctgttcaggcatgcgtctccagcctctttggcattagctgaatctaaatgcagtcatgttgacaaccgagattagccatctcaggaacccactggaataatgagttcttagggtggatcttctatgtggacagggctcttctctcctaattgtgtggtgtgtgagaacctaagagcacttgggtagaatagatggatgattgatcattttgtggaatgggaggcagtagtatagactagtgtgtgatttgactaagggtcactctttgcactggaaactgagtctcccatatttggctcagacacatacatgctgccgctttgcttttactgtcctggtaccttgattttagaagtgacaccctagtagaggcccttttttttttttttttttttttttttgctggcatatttaactctcagaaaatcttatgagttaagagggacaagtttgacttttgtagcagagacaactggcaacctgcaatattttaaggtaatttagtcatttactgaagaagtgctggaggcaaggcttggagctggtttttctaaaccttttattgtgctatgctgccttattatactccatggaagttgatgtcataaatgcccaaacatttaaaaataaattggaaaagaagtcacatcttactgtggctccagcccttggcagtgatgtttttaagtagaggtttgtgttatgagaattttgtttcaaaatgctgcatgtgcctcttgtaaaaggttaaatgaagcaatgttatttttcgtaactggcccatatatgttcatttactttactccttcataactccagctcctttagctgaatgaagcactgctgtacttttattgcagatgccgttattaaaagaaatcgaaagatgctttaatactgaaacggagctcttaagaagcagttacagttcctagtatagtttaagaagtcacctggttttgtacttgattcataaaagagcaaacttccttaactttgctattacttgataactattttagtgggggtgggataaatgtcttgtgttttactgatttgatacatattgctgggggctggctttacataatggaggcagcctttcattttttggtatataatccaggcaaagctgcttctaagtgcaagtcgttgccctttctctacaaagcatttgctgtcttatctgatgcatatgcttagtagtgacctcggtggctcctcagacaaaatgccaaaaactgccatgtgatctaaccatgcacactccaggaatttactcaggcatctaagtgagcatacaacagtgggacaataacagtcacatgcaatagggatccttctatatccatgtgcatcggggtacttttcacaacagccaagatttgaaatcagcggccagcagaggaatggataaaggagatgcgcatatatacagtggagttttattcatctatgaaggagacaggcattatctgagttggagaaaaataagataatttgagatgatcctgtaagaaaaacaaacaaaaagaaccaaaacaaaacaaaaaaactaggcatagtaaatttaagtatcatgccttttctctcttagtggaatccacacacagaacacagcagtagaagagacactgtgtaggaagagagaggacaaaagagggtaatgcagaaaatacaaacatgccatagctctgaagcagtggagcttggtttggaatagtctcctcacaaacttgccaggctactagctctacatctgtaaagattctgtagaagacacgagggtgctccggagtatgattataatttgtaatgcacaatgaagtccagctgagttggtcatttacctgaagaataatattctagtctgttgtttgttactctaacaagttttccaagactgagccattcataaaacataaaggatcatttcagtcatgcttctagaagcaggctagcccaagtgtctgtggttctggcatctgcttagcctctggggtttcttgttttgaccttccaatatggtggaaggctttgcataaaaagacagagcaagctaggaagaggaagtcatttttttcttctgttttatgacaaaaatgtgtcatcatgacctagtcatgtcccattctttgtaacttagaatcaccatttccaacagacagactgtagggggaatatatttccaccagacagcaggttggtgaaccctgattttttttccccaagacagggtttctctgtgtagccctggctgtcctggaactcactttgtagatcaggctggccttgaactcagaaatctgcctgcctctgcctcccaagtgctgggatcaaaggcatgcgccaccacgcctggctggttaactctgaataaccctcacagtaattagcagaatagtaatggggtgatggtaccccacttctgtcaggtctatgggctcctctagagcttagagagtactcagcaaaggtcatggtgttgaaggtagaccttagtgttaactaatacatttactttttatttgttgcagtgatggttggtaaatactgaattaattattgccaggaggaggaataatatatacattttgtatttgtttgggatgtatttgtatataggtctgaaataattgaatcagtcatataactttaaataagtgaattaattgaaatatacataaaacattataccagtgacagctggtattagtatgcataaaactagctaactgtatattcattatgttcaagagatttaagaggtagaataaatatatacacataattgaaaataaaagtagaaagatatgcctttatcctaagacgactggaaaatatataaacttaaaaaaataattcattgaaatattttcacattttgtctacacaccaacttaaaaggcttttttttttttagttagaaatttagtatataaataggtatttactctaaatacaatttagaatcatagtaccttagtaggtgagtggactcttgctcgccgtgttttcttggagcgctctacccctgttcttgtttctgtgtggctgggattgtgatctctgttgatgccatcctgtgaggcgttttcaactgatccctgtaaattgcatggaacaagtgcctctcttatgctaatatagatctagaaaacactgcactgaatgtcatagtactctctcagaagacaagcacaggcttcaactcactctcttactgcgactaacagtggtgagctgtgagaggtgactacctgggctcagggttctgcctgtgtgcttgcatgtgatctggctaggtagcctgccctgtctgatgctgcctttgtcatctggttgacggagactatgacagtgccttcctgtaaacctacactgaagaatgaggtaaaaagacacgtgaggtatttcctaccccttttaagtaaatattagctgtcgctaactggtgcgtggttaatgggttttagttggcaggcttctgaagattggtaggaagaatgagtgaggtgaattgtttgtgtcttagaaaagcagatgggattaatctttttgttgcactaatttctcttactggtatttactttttaattccccttaggtttgagatggtatgttctcctgggtggttctggggaaaatttaagagggaaagctgggcgcagcccctgctacccaatctcagttgcaggtgcctgagccctgtgttccctctgtccctgtctgctccacccagctggactttgcctgagggaggaaggcagctggtgtggtggcgcatcctgtgttggctgtgactcaggtgtgcctagagagaggttcggcttgtggccctttcttctctcatacacagttcctgtgccagtacctggcagtttgtggctaaactaggatctgacattcaaggtactttcataactgtgatcattgctgctctgctcaccatagccaggaaatggagtcagcacagatgttcattaagtaatgagtaaatacataatgaaacgtggtgtatgcacacagttttattcagccttaaagaaaaatgaactttgtgatgaaatggaggaagctggaaaacattccgttaagcgaggtagcccaggcctggaatgacagcactgcatgctctctgtgcagatcccagcgttttgctttactctaagtgtaggtatgtacaagtgtgtagagcccagaaaaggagtccaggataatggaagaaagaagctttaaggagggcgtgaggagagtaatagaacacatgagacatgagagcagaaggccaggcgaatactgtgagcagagagaggccagcgccatgggactagccaaagctaaggacatgggaaagtgccatgaaaaaactgttagtctgtatgctaattaaaaagtaaaattatatttagaaaggcccaaataattggcaagtggtacgttcatttgcatcggaggatacatttccctagctgaggtcacaaggagccacagctagaggggtgtgttgtaataggaatctgagctatgctgtacctggccttggtccagaggctgactctgcataggtaagtcattatagggactgtcccttaggctgtcatagtggcctccagcaaatttgggcagaataatggcatcattttaatgtttaagtttagtttccaatagggtctaatttttgtagcaacttgtataaaatttattaaaaataatgccagcatatgcttaagtgttttcattatacaatctaaacacaaagacatacaatatatacaccccagatgttatacaaaggtcttccttatacaaggtcatagattgctgaactgctgtgaattttagtgcaacttaatgttagcttgcttaggaaacattttgaatcaaatagaacaaaaatgactagcatttccacatgcagagagtattgcagtatttagtatatgagacgttttgcgggcatttttctcttgtcagtgtgaacatttagtggcagtgtagtcctcattattaggccactcaagaacacatgtgttcagatagccaagttggaactctactttcagtgtatacatatgtcaggtcatcagaatgacagaagtgacagatatttttgtttgttttgaaagatttatttatctatgtatatgagtgccctattttcaaggatgtctgataaacagaagagagtgtcagaagagggtatcagatcatagagccgtctctccagcttaacaaacattatttaaaagttcagtttgctatctataaagttatatgtaactttacatttttttctttgtgcagatcagtgtttaaactcagtgtctttatacttgtaaactaaaaactggtattgttcggtcagaaggaaggtcagagttcagtggttaggaatactggaagagctgcctagtttggttctgtcctaaaagtgtcatcagtctgtagttgtattcgcagaagtgtcattaaatagctatatagaggacaaaccaaaaaacaacacatcagagcttcaaaccctgggacatagtgagtgaaaccaagtccttcatgtaagtgaactgataatttccttagcttattttgaccatacaaaatattacttacaggaagtctggctacctttccatttacgataaaacgtctcagaagcaatgccagacaaaataatccattaggggctagagagctggtttagcttctctggtcttcagagcggtggttctcaaccttcctaatgctgtgactctttagtacagttcctcattttatggtgaccccaattataaaattatctccttgatacttcataagtgtaattttgctactgttatgaacataatgtaaatatataatacatgaccccaaagggcccctgggtccatggattgagaaccactgttgctgcagctctgagttcagtttccagcatccacatcaggtacagttgccagtatctccagttacagagatccggtgcatttggcctctaagatctgtcactaatatgcacaaaccccacccagacacagacatgtgaatacagataaaatcttaaaaagcaaaaccatctagaatttataaacaccaatatattaaatatctttactgttaaacataagtatttatagaccttaggctgttgtagtttacattttggccaatcattagtctagatgataaacttatggaccacccttgaatttaaagtttgtctatagcttttatcactttgataagctatttctgaattataaaataaaatattagacttactaattgagagttaccaatttttgcactatagagctaatgcatttaatagtgtcaaacatcagtcagtatttaaacatatttgacctgtttagtgtaaagaatgaatggaataaacaactaagtgggaagtgaagaaagtagcctttactttaaaataattagttgtagacattggcaataaaaataaatcaaagttgttttgtttaaaaacaaaaaggccagacttgttgctacacacttttagtcccagcacttgggagacagaggcaggcagatctgtgtgtttaaggcgaactttgcctgcttggcaagtttcagatcagccagggctatatagtgagaccctgtttcaaaaacaaaacaaacacacaaacaaacggcccagattgacaccagctaagcttgtgctcatttctacagttttaaaaagtggtaagatggttcagaaatgggactttgctgttggggttgttaaaacacagggttattccctcctgccaggaaggaaaagcaggctctgggtcaaccccatgcaccccctcccccacccccacccccgccatggctctgtgttccccttaagcttccataggcagcagcaagccccactgggtctccagcctgtgaaacagcagcactgggtctccagcctgtgatcagtcaggctccttgctatgttgttgctatggatctcatcatggaacctttatgctccactctgtatttgcaaaggaaggaactacagttctttgtttatagaagcctaacaccaacacaataatgaaacctctttgtgtttagcagcatattacacataggaagaaatgcactactaatcatgaggggcaattttgatcctctcatgaatttattggactacttttgatgccactcagaactaataccgtaaacagcggatggcaactaagaacaggcttctagaagtttcatggtgttgtagaattcataagtgaaggaagggtgttcctttagaacaagcagactctcatctcccctttaaagggaggccaggtcccctccagggtgttggtttgctcatactttgctttcccaggtctatgtgtggcttgactggtgctgtctttctggaactttgaaagttgcttagcatcatgggatgcgtgttcagctggatcacagcgttcttgcagtcagctctcaggagcatcctcctaagggcaaggctgcactggtaaaccccttagtgtagagagctcagagacacaagcagtggagactctgaaggatgcagggtgtgcttgaggactcagtcaagttgataatgctgtctgctcatgtttgccattatctttgaagaagacagctgcttgtcccctgagcccaccatcagagctctgtgctgcagtggaggtgccagtcattgtagggttgtgtgttcatttacctaagctcccatcattctctgtctgctcctttctatcccaagggcctcattcaaaggtagttggagctctgtaaaccaagcagttggggaccgaggtaagaatgtagctttgggttaagcacaaacctgctatgtttgcattagatagagtgagtgcccagtgcaatggtggttaatgtagaacattagaaatgctcaaacaatggagatatgtgcctgcgatggaagacactttctcctttcttttctttcaccctgagacctcctggttgatgaaaggaggaagagagagctactcatcaccttgagaggaggctgtcacttgaatttttccaaagcttcaaatcctgctgtagccctctccagtttgccgtcctgccagcgtggtttaaaggttgcagacaaagcaagtgctctcccttgatccatctgggcccctccctctgtcatccgtcattgtcaatgggagatgtgtgtgtagcagcacaagggcactgtctgaccgcaagggtattggctatgttcttagagaaggtattgtttgttcagcctctttggaatcactgctctaggcgttcctgagcccctggctgggcatggctacagactgcagggagagagggaacattctggtattaaaactacaggagttggagtctctctgcctagtgtaagcctgttctgcttatcagtatacccagtcttttctctttttcatttctcctgtttctttggtccaagtactttgggagattctgaaaaaagggagacaaggacttgggatctacttctttttattcaatgaccatcaacaagtaaataaagaaagaaaagctgacaaatgcaacaaattcaaagtcaggaaaaaatgaaataatgctcctttcaaatacagggaggcggttgcctgggaggagagagtaaaggacaggacaggagggtgggaccccagtgcctatagtagcacacagaagctactggctgcaccgggctgcccaggaacagttaggccatgctgcctggaggcttaagcatgcgccccgctcgggagagaatagcacatgtgcaggtatggcacactaccccagtgtctgaacataaatttatctcagtgtttcccaggagtgaactgatagtgacgaaattttaatgggagaatatctgagttttgtgaattcccctgcatgaaaatgtctccctttctataaatgttacaatgatagttgtggggttagaatgatccaactactatcatccccaaatcttacctaagagtagctcccttgttaacaaggcggtgtggattcagtgaggagtagctaggatgaattccttatcatggactgcctgggacctagggtttccatctggacactgggccccataccttctcttcctatagcatatgggatagagagtgaggagtgatcacatgagatgacatgaatgatggcactgaagggttatttatttctctaaagaagaagaggtgctggctggccagggtttcaccgtgactcacatccatattattgagctgcagcgcatgttttaactcattcaaagataagtccatcattcagactcagcggtgtggggtaccagacactcagacctggaacacggtgtacttttctggttaaaatcccatttggccagaaatctgaggatccagtcttttccttcctgcccctagcattctggtgccttctctccaccccccacccgcccatctttttggcttactgcaacctgagtgctactttttctgggaaagcctgatattctgagttcagttttataatttaatgatagagagtttccttagtaaaccaaatttagaatcctagaatgcttatcttatatccagaccttgaacataaaaggcattttatacccgcaattgttcatttaatgagcaattgcggagtgcaggccggttaagggattgagctatatgcactattattgcaagaagtattccgaaataccagaaataggacgtaagctctgatcagggagactgcgagcacaattaccttcttttcaaatccttctgtgacactgcgggaggaaaaaggactttgaaacttgaaaggaaagagcttgctttcaacctcaaaagctaggaggaaagggctctgaaatttgctcagaattcccaattcaccattagcctgtttcttcctttagcctcaaggcattctccgctttttgaaaagatgttaagaaattcagtcacaatagagagcctagttttgaacatgtttcactcggtccattgaggtctgggctccagcctttgtgtggggtgaattgagctgagcggctagctggttggagagaggtgaatgagaagtcgctgtgcagttgcaaattctggcaaagaaaaaaaaaaagctcaccccttcctttattttgtaatatgcattcctgtacaatcctgccagtggcaatctgtggagttcagtgtgtccctaagtcaatatggagtacttggtttatagcaactcttgttaagtttgtcttgtaattgaagctgctgttgaccttgcttggggaccatttgtaaaaccgtttatttagcataaactgaaataataaaccctccttctctggggccgattgtgatagggtgacattagtttgatttaatgattacccgcctgacccttctgctggagagggaggcttgaatagggagagttcacttccaagcacttgcaaagaatactaatgagcttgttaaatttagcatggctccaaccacttttaattcctctaatcagagccatgctgcctgcaagagggagagagggagagggagagggagggggagagacagagacagagagagagagagagagagagagagagagagagagagagaggcaagaaaggccaagagatactgagaatgttcctagagggccggcccagctagagaaactaagtttctagaaagtagatagccagagtccaggtactgagttgtaagtatcatctgtttgcttactttataccccaccccaccccatgcagcttttatagctagtgggcaagagaagagtaatggcattaaaatgggttttcaacaacggggcaaaatgggtgttaatggagagaagagctagcaggtgttctttgagctcctaaacagccaattttgcagtgaatggaggtgtccttcttaatgatgactagtggagttttgtttctgcatggaaagctttgtgtgaaacatgtcttacatactaggtggaaaggaccttgtgtcccttgtcccaggagtttgtgatcaagtgtgcaggagtgtgggtcccggtctcctttcatagagctagggtacttcatgatagctgcctttacacagtgtttgcacctaggctgtgtttgctctctctgagtctctggcattaagttctgactccctgttggttgatttttggaggaggttggaaaatctggggcagtttctaagagggtgattcagggagctctgtctttgggtgtgggttcatccagatctacctaaacacaggtgacagaaagaaggggttaccagtaagattgtggtggcagcacttgaagtaattgttcccttccatttctgagaaaattgcatgtttcagcttgacccccaagcttacagcttttcagcagggaagctcaaacagttgcttgtgtttggctgttaaagcccattggcagatgctcttggagccctgggctgtttgcttatgttcttgcttctgacttctgcttgttaccatggtggacagtatgtttctgtcaataatttggcctagtgtagcctgtctgcaccgattctcaaactttattgagcagctcgcctcagctgaacgagatgagacagctttcgtcttttggcatgcagaagtgcttgctaaatttataagagtaggcaggaatattgcttgggagttatgctttccttgtgtacacagagctctcaagtctctgagctgtttgtatctgggagcatgtgcattgtctagtttgcatgtgaatgcccatcaaaagcaactcaatacagggaggtaaattcatgaagtgtgtgtgtcttttggcatttggaggcagagggttgttgaggtcacagtgccaactgtgtaataaaagttaaggtttcctgatgaaagtttctgtattaaaaacattcttgcttgcatttaattttttgaagttaaaaatgcctttttttttccctgtttcaactattgagcttgtatgacctttccacacaagttgggataagtctcattagcaaactcatgaccactatgctaggaggtaagcctgttttttttctgcctttcctactttctccctgaagattgaagggacctgacagggctaaggccatactaactatccagttggtagtaaagttgtattcacatactcgtcgttggaagacacaccaccagagaaccagagctgatgggagggatgcaattttaaaagaaaaaacaatttcctctgggagaatgaagccatggaatcctactttaaacctggaatagattagtaagacttgcttactcatgtttcccaaagaatgctaattaggcatcacagcccctctctgttgtatagaatgtacctcttaccactctaagttaactttagtctgaaattttaaataaaggatttcctgagcacaaacgagtggaaactatgacttgggccatttgaaggctgtaggacatttttaaaaaaataaaacggttagtttcagtgtttctggcgctcatctgcttcttttcataactctgaagtcctttctgtagcctgcaaccacactgctaatgaagctctggggcagacacatgcctgcgcatatgaacagggagaagaaaaatgaaggctcttatttggttatttttggtagtttgtcttagaattaccagcagcaataatttgaattactttttcaaagatcaatgtgaaaatcagggattatttcaaactttgtgggttttagttcttatttgatagattaaacttgtgatttaccctttacttatgaggtgtcaggtaagaatctgcacaaaacaatacaaaaataatatttcacagttgctttgtggttgtcagcacatttattgtaaagactccaggatacctcatcatgttttgcaaggcatttggggtaaaataattcatcatttatttttcaagcttcacgcacaaataagctgaaactctaaagttggtgttggcattaggtaaaatagtgactgtaatctcagtttctaataatgtatagtatgcatagatctgctttcctccagagcaaaccaagggctatgtgcatgttagaagttagcagtaatcccggttggggtcagttaggtaattacatctacgtatggattactttgaatagacgtttacatattgagatatgttagtctgtctgggatgttcaacaatgattatacccacatagttatttctttaaggatagagaatatgaaagtttttcagttagatatttaggtaggacctgtacagctttgtttctgtgagctctttctgccagagcaatcactgctggttaaatgtggtttgtttagggtggacagcttactgcatgtgattgtaacaggcaagtgagtccacctgctgtgagctcagatagcagtttggctgaagtgtatgcctgcgttctagcaaaggtcacccagtcccattcacagagaccagtggtgtagagatgggaagttcttataaggtgagcagaagtattagggatttgtaaagaaactgtgtgtggggtttcattcttctgtttcttaggtgtttgggtcacatctgagcatgacagggagcaacattcccgggcctttcctcctttatctacacagccaggttacacctggactttcagtctcaaccagctctcctcttggttccccgtttttgtgtatgggcagacacacgaagtgtatcttaggaggttctatgctgttcttgattgacaccttggccctggtcactagcgggttctgagtttcatttctggccttgttaaatctcttgatgggttacaaattcaattcgggggggggggacccaacccaactcaactcaaaccaaaccctataacccacaacatttcttggctggctttctaatgtcatcttccgagaaacaaagacgcagcacttgtagagccacccagagccccactgggcagttgtacttcccagtttccagggaagtcttgtttctttagcgaggcagaaagaaactaggtatccacatgatctgagggtgataaagctttcagcctggggtggggcatgcaggatattggtgtattttgcagagaatctccactgcattatctgccctttatctgcactttttacctcaggcttactcctgctttacccttccatgtataatattggccaccattcatagacaactttgttttgcaagtatcccgccacaggtatgaatttacaaggtagtcatgaaggacaaaggaggtttcttccctacagagagaactacagggagaactatattgatgacttttttattgctccttaaagaagattctaaagtctttcattttccttctttctatagaggatgaaagtcctggacagatctatcaccgagagagaagaaacgcaatcactatgcagcctcagagtgtgcagggtctcaacaaaatcagtgaggagccctcgacgtctagtgatgagagggcctcgctgatcaagaaagagatccatggctctctaccacatctggcggagccctctctcccttaccgtgggactgtgtttgccatggatccccggaatggctacatggagcctcactaccgtaagtacttcctgccaattagcacattttctgagagacatggggtgaggggtgtgtatatggtgtgtgtgtgtctgtgcgtgtgcgcatgtgcgagcgcacccatacttgcacatgaatctaatgtatgaattatcaattctacatttataaaaagtaagtttaattttgcattttttcctacttttgattctcatccataccgtttagagagcaacagtttcttgtactctaagcaattttatgtttttcagggtgtggggatttagggggatgattttgttatgaatccttatagatatttgctggagtttgaaccaatatgctttatctatgcagggatgctgtttgagaagatggggttgagggtgggaaactgttaagggggctacattaaagcctttgatggcagttcctctcatttttaatgttttgtgtgtgtgtgtgtgtgtgtgtgtgtgtaatagttttgggtattccaatgcttagtgatttgtggaaacaaactaattttaagaattcagtgctaaatttgttactatggaagtttttattgtgagcccaactctccttatgagcctgccagagacactggaagtcgcctttctagtcctaactgaattaaagaaattaagcaggcctcttggagtataagtctaggacagttcttttcaaaggcagcctataaggtaaatccatacgggttgagtttacctcaggcctgtttctggtttaagaatataatttggctctggagtaatgaaagtcatgttgaggtggcaaagctggaagctcctgattacagatttatcaccttgccaggaaataggctcgccatttaaccttcctgcctccagttccagatgatccattgagctccagagaaagagactggtgtgtttcccttttcccacatcgttcagaaattttagtgttttaaggcaaaaggtcattatccagatgactgattagtgaggacagctgattagagcgtgttattttgctcaagaaagtgcccaggataaaagctaatttcatcccttcattagttggctgcaagcaaggggaaggctcactcactcctcagatcaaagcgcctcgaagcaaccttaagttccagcaactgcttctcccaccagaatatgttggtggaaaatatggctatgcaatagtttctaagtagaaaggacagtttttgtcagaagcatgaaaatacgattgtttggattttggggaggggcagtggttggcttttaaaaagttaattgcttttcttgaaaaaaaaattcccattggtcccattattgaaaaggtgtctgttgaagcagaaacaaagacagaggggtttggacaactattcttccttcctcctttcaggcttacttcattttgttttttcttgacttttaggaaggaagatttaaaatagtgttggtaggatgttttactctggtcacattttgaagtctttagttgtgtttttatttgtggtctcttttgagtatcattcatgcagaaacagtagggattcctatagagtccccacctgggtttatatatccgcatgttaagtacactcactgtgctgtttaagctgcccacaagctcctcccagtgttttgtatttctgtgtgaacacaagcttttcccatcacagcgatgttttgttttgttttttccaatgcccactaattagtgaggtgtttaattagtccagacagctgatgagcacttctttctattggctgatggtagtggaaccgttaactttctatccagtttgcagcttgttcttgcgtcctttgttttaacggtttcccacccaggcgtctctccatcctttgagggactggctttcccgtcactggaacccctgttctcacccagtggtctgtgtgacccatttgctggttcaccaaaataatgttaacgaacactgcctggagatcaaatattatggtttagacttatttattgctttctagtttgaagatattgtacttgtaagttggttattcttgtgattttcctacgttactatacaagtgaatgtagaagtaaccttccagtcttgagctggagcccctcggcaagtcagtgttgagtcccccacccccaaatgttttccctaccttggggacattgtgtagatagctatgtgcagaaagcctagaaaactgaacagactggcttccgattacagtgcttcactgactagccccgtgaccttgactcagtgtgttgactctcaagaatctttttttttttttttttttgctctcaactatgtgcagtggtgtgactatctgtgccttagggttcttctgcagttgagtggatgacgtgatgtcttactaaaccccagcgcatgctcagtgcctccgattatgaaaacttctgctcttctttctgtgcttccttttgtttctcctctccctccaccatcatcatgttgctcctcgagccaagccatttctgagacagggcacattttgttttgtcttgttttcctgacagacccagacacctctgcctatagacagagattagaaaatgagtgggctctaagtaggagcaaggagggtcagggaccatgcctgtgacttctctaaaggcagtctttcccattgaaccctcctttacgcttgcttttctcttctttgtcagtaaaggttttctctagagattataacattttaaatttatgtagcaagtaaaagtacagaaaaaagtacagtattatttgttgatacacaataattaaactattctaagccaagcttataccagacgggatatgaccttatttttctagaaccctgtttggttatttaatcttctagttataccaagtgtttttattttttttaatgtgtttatgatcaaatctgcatacctcacatggacttaattatccaggcaaagctaatgactaatgtgagctaaaggtaataaatgtcctaagaatttaaaaaatgtatttgaaagaggcataaacttttatcccacttctgtttctgtgggtaaagctgtctcctgcagtgctgtccaagcccacgtgcatggcaggcctttagaactcggtgctcagtagcctctctgtaggctattcaggcctctctcctgtgtttgccagctctttgagacagttggatagaaaagtctccatgagtccaatgtcagtaattccttcgattctccatggttggaaaatgtagacttctcaaaatgcctaatttgtgcttctatatatactaattttgtatttctaaagtgtgggtaggtttcctgtaagacaagcaacgggggaaaaacccaaaacatctttttcccttctgaaggacatatgtaaaatttttattgcataagatcttattataatgggtatgcagtacttcatcctcaacaaactatagttaggcagaattcaaagtattttagagtttgtgggtttgacttaaaaaatatgaaaagaaaagaaagaagaaagcctagggatagcgggcacttcaaacattcccaacatgtgtttggaataaaatccacacggtggggaggggtggggtgttctctcatgaagggtagctgtagatgggctgtatatcagggcaagagaacaagcatgcaagttgcatggctcagacatgatatggtgctaacagcctcttggccacagtatcattcgcatgttatagtttgggctaccttgaggggggtggcagatttagggatcctatctgcttataccagagtcaggctaagagactccatctcttgcccccaaggattgctgagcaaagtttctctcctgctgctccatctgtagccagatatttcaagtcaccatcacccgctgctttcatttagtgccgtacatttattgttttataaacctggaaaggcaggtgacataatagttcaagcattctttctaccctgagtgacactaacttttattctcttcccttttaccaaaaacatgtgtctcactgtcttccttctcacttcccagggtgtagtgttgtagctgtctctgtagggttctgtgtgtgtgaaatttgttggagtcactgagcatgtcatagaaggtctcgtttttttcttttttaatggagctgaaagattccttctctttcagaagttcaggtctccatcatagttttatagttatgcacagcctgcttgtttttcctgtaccccccccccaccgctcccaaatagtaattcttcatggaaaatatgatgcattcttgcatgcaaatgctttgattgaaaacacaccactggtattctcccttatgttatccagctcaaatgacagaactattagttgctaattagcaaaacctgaggaattagcttaaagaaaagaaatggaatttttaattggcttgcatttattttctgtagaaagctattgtgctgagcccacttgtagtcttgtgtgcttaaaaaaaatttttttaaaaagcacatgcaaagtgttttgctttgtttgttttttttcttacctgtccgtctttgtgttagctgactttccacagccttagaaatacatcttgtgactgagggggagaggatccatattttacatatttaataggtgcacctgctcacattccttctactttgcagttgtcatcttgagactgtagagataaaaatgcctacaaggcacaaatgaacagtttggtgttgaccgaactgcaaaggtagtgacagttccctgagcacatagttccagcctcatctcgattgtcttttcctccttggagaactgctgatgagctaggaagggtgtttgctttccctactgaatgttagattgtttaagtagaggggctgatgcggggtcttctctgggggtgctctgctgactatcttgcttcctagctgtgtggggaggggaggagtgaggctgacagaaagagtctccaaacccttgcatatctgctatttatgagctttaagacactgcttttcatatctcttctcaaaagttcaatgttacactgattcttgcttgcagggacccagggtagaaacaatgacccattgctgtggagtcttacagctacattcatagctaccttacaaggtgtctaaaacatgaaggaagtgggggtaagtctagcattctgactttgagctttttctaaggaaggttgagtgagagatggtgagtgagaggtggaccaggtaactaagaaaataacggtagcatttgaagaaatgctctaaattatgattatgattaactctagctatagattttggcaagataacttactagaaagccacacagatgagaaaaagaaagaaaaggaagccatgttttttgaggaaatcagttagcctataagatggttaacccctcccacacctccaagttacatcccttcacatcagtcagcactggctcccttggaccttgactctgatcctctctgccttctggttctgctcatgtgcgtgattctcctagagcagctagacatgattctatcaggtactgtctgccaaaatgccttcctatcctggacacctaagagccatgggagtcttctagttaaacacattgttactgctttccctttggttgtcattccactgaagccacatctcttttggaataatgtgatcaggtcaaaggctgtgcttggcttttatgttcaccagattttttggggaaggctggggagaaggccgctattctaccgtagcagggagtatagtcagggactgttaagtgcccgacagaggttactgtgtggaaactggaagagatgtatttccttctgttgttatcttagggttagtccttatgtgctgtacagccccttctatatagagttataacgttgctgggattcccatgaaagatgatttgtagacctttggaattagttgacaggttatacacagaaggtatatgaaagcctttttaatactgtgcaactagcacaggagagccgcctgtcttagttgacgtgacactcatgcaagatgggactgtgggtgttttttctgaagccgagggaagcatagtgctgcttgcccttttcttcagtaaccacagtaattctcgattttggtaataatgtccctagtgatccttgtccggtgtgtgtgaagtcgatgttaatgagacctcccatcacagcttagctcaggagcaggaatacagttttctaaaattgtcacgtgatttttttacatccttcttaatttgacaccagcccaaacagccctctcctagggtcctttccctccagtccttctgtttatctaccttctttctaaccttggattgaagcatgaaaacaatgactcctgcccatttccagcttctaatggaagcaacattatccatggccctcctcctttttcttgtataattaaagaatgttacctttgatgtctcttgaaagccgtgtctcccatcctgctttggctttcttgatcttgtgtctataaatctgtgctgagtcctcacacttctccatgaaagggctccattttctctcttctgccttttcatagtttagattaatacagagtaacaaaattcagtcttttattgcagtcctggtggcctgataacagtttaggtccttgtatcatactttctcagttatttgggctttgttttggtctccagtaaataagatcttttccaccttcctagagccatccttttttgggggggactgaaatttcccactggcctctatttcagatgaatgtcctcatcctagaacaaagagaagaaaatttttttcttattgatggatttgactgtccagccttttgactgtgtctgtcatttgttaagtgagcatgtacttactgaatggcccaagtgctgcaaaacactgaacaaaaagagcagtcccctgattctgtggatcatggagaccagcagacaaagtcactgagaaggccttgagggaaagacagtttggtgtccttcaggagtatgtgagacacatagctcctctggacattgttttatcaacatctctctgtccttgtctctcccaagatgaagccaccctctgcccacaaaggtttctttagcttcctctgggtatcagtcctcagcccagaaaactttctgaaggaggtaaaagccatgcaattctaaggcaaagaccggaggaaagacaaatctagatcaagggacattctcactggctaggaggccacagaaagcgtgctatccaagggggagctaaagaaatcttttgggcagagggtggattcaccatgggagagatgttgacaaaccgatgtcttgaggagctgtctgctcagcctcaaatccaggctgatcccaaagactctcgatacatggcttttgtgaattaacaaacctctgggtaacttggatattgcaaatcgggagtttctctgccttagagacttgcatttaccctgctttgaggatttacctagtcccccaatcccacagcttaccttctgggacttgcctggctgactgctcactcccacttctggcagcattttatattttcatatgaagacaacatagtggcactttcccttgttctccaactgttgctcttgtatgtactagatgaccccaataatcacagtgtattgaacccaaattacaagtcccagacatgggaaatcatgtgctcgcttttctaaagaactaagtattctgcatgaagacagtttttaccttcagaatctcattttcacaatgagaaaactcaaaccattgtgtttgtttgactgggaagctcccgagttagcataggacagtcaagccagaaaaactgtagggaggacctttgttcagctggagatggtgccagcaatggctgggagatgaagctgggggattcggtagccaaaatgtcagagaaaagaagaacaaagactcacattagtggaatgagccttcaatccccctggcctaaaataatctgatgggagatgctggaaccctggaggaggagacactggcctccctgtgggggtcttggttctaatcagcagacattgtactggtcagtgggagcccactctagggagcgggtgtttaccttgtccactggggggacccaaatctacatgctgattgtactctgactggagggtggaattgaaggaggagcctgtttcctaggaaatataaagagaagcagagaagtgtacataggggtgcagagaaacaaacagcccctcttcttttgacttgccttcttgggctaattctactttcaaattgggcaggatttcaggctcctctcctcgtttctgtttctcccctttgttaagaatgctctcccccaccctccactccactcccatcctccagttctcagggcctagaagggaagtgcataatatggtggttttcttgtggcctgatttcctaccagaaggactatgatcccttccaactctgactctctttttcccctccccactactaaaattcctttagccacaaaggcttctttccaggcccccatgtgttagaacttcctttggtctctaggcctttgcaaatgttcctttctctctagactactcttctaacctctttgccacaagactgttatattgtcatttcctccaggagaccttctggactatgtggattgatcatttcaaccctgtacaaagcctacttatctaatatgcagctcctccccctgccccccaaaaagacatctaggggatgatttttatatatctttttttttagtttttattttttggtttttcgagacagggtttctcttgtagccctggctgtcctggaactcagtttttagaccaggctggcctcgaactcagaaatccacctgcctctgcctcccaagtgctgggattaaaggcgtgcgctaccacgcccagcggggatgcttttttatatagtcccctttgtcattgatattttgatagcattatgtatctattacattactgtaaattgattacctagagacaaagcagtttgaaacacctttctcagattcctttctaggacccagtacccctagttgactacattgacacgacctgtgcaagcatatagcacttgaaaattttcctcatttcaaaaactaagttttttgagagtctgctgtgagtgagacactgtccaggatggggacactgtgagagtatttgccatatcatgtccttgctcccaaagctgctgagaggagacacataccgaataccagagacctcaagaaggaacaacagatggtcccctgtggatggtgcagctggagatgtgtgatgggtgctgttgctgttgttgctgctgctgtgaatgtgtgtgtgggggtgggtgggtggctagtgcgctgggtgtgggagtgtggatgtggggggcaccctgctcaggaaccagaagccacaaagttgaagtgatagtctaagaagggacaagtgtgctaagaagggacaagtgtggtcctggccatgaagtgggatggtctgcggagacaagtgggaggttcggttcatctggcaaggggtgggtagaatgtagaaagagtgcatacctagcaggctaatgtagctgcccacctaggaggctccctcctcagacactgtggcccagacatggagccccactccccgaaaaacattttataacatagcctctacccttgaacttctaaatttacgtatttcatgagatgttgtcaagacttctcttttgatagatgaggatatcaaagcccatgggagctgaaaaagttgcctgttttataaggtgtgaacccagttttacttaaaatctgaggttcttcacttgtgattaataactggcaatttcaaagatggtccaaatctatgcaagggccagttctgatgggcactgtgtcagactgactaactagaggacacttagaaactttgtctgtcttaaggccgtagtatggagtaatgacagtgctttatgtagacttggggtgcaggtgtttttggggtgctgtctgggtgcaacactaggatgaagaggcttgtggttctttttgttatttggctccatcctagtgtttgggcggctggttctggtcattcttaccccccacccccacccccgtcaccaccaaaatatcttaatttatgttttgatgtgtgtgtgtatgtgagctcacgcatgcaaatgtggtagctgtgcagtccagagaagtaatcacattctctggactgaatttcagggcatggcatggggcgccaaactcaagtcctctgcaggagaagtaggtgtgacttctttgcagctgagtcatctcttcatccctaattttggtcatttttacctttgtgttcaagtgggtatgatgtggaggatcatgaggaacttctagttaattaatactttctcaaagaaagtgaggttacatataacttaattataggaaggctctgggttctcttcgtgctccattagcaatcacagtaggcgcctgtgtgaagtacttacttggctaatcgttgttctgaggacctcactaaacaacttttgtttgtttgcttgtttgtttgtatagaaactcattttaccttgaagaaattgagggtcaggtagacctcctgaagctgagctccaggcctggggtttgggctgaaggagggaggtcctgggtgcatggcttttctactttgttcccccaattgtgctcttttactggtttctcttgatgctacagtagtagcactgggaacacagggcctctttggaccaaagatctcctattatttgacctccagttctaaagaacagtgacaatgtattagggactttgctatatcaacaaatggcacaataactggtgttctttatacattttctgtacatagagccacaggtaacatcaaggtcactcagtgacgcttaatctgcccttctcagtggcttttcgtagggcagcaacctttccctgcatcagcaggggaggaaatgtaagggacaatgtaccaactttagctaaatacttggggtttttatttggagggttacaaagtaggggacacctaaatgtccagtggtctcactaagatggacaggacacttcattgtttcttgactttggcatctcagataaatgattgagggaccagaagggtaatttatgagaaaagatgaaaaagacaatgtggatgacaaagcttatgacaaaacctatacaggctgaagccagacatggcaactcctgaccagtcactggagaaagacactgagtggaaaaaaattgtggcgccaactgaggaagcctctggcatcttctgcttattcagggacctgcagctagggctgctgtttgcattaaatgtatccatgagctgttagtgtccatgtgtctaaagttgcgttccagagacttacagagctagattcggttctgtgtaatccagacacatgctataacaatgccccttctgtgtctgcaaggtaaggaaagtgaacggcgtcgagacgtgcagagcgactgtgatcccctgagcaacctttagccaaagaagtctccaaactatgaaaaaacgattacaagcttttaagagaaagcagagggatggacgccttagatatgtttctgcctccctccccccattaattgatctctacattcagctcttggttttatattttcgggagagaaagtatgaaacaacacacgaaaacaatgaagtcacatatcgacaggtttgaactggtgagatgaaaggctcaggtctgatgagggtgatttctgattccaagggggatttttacaacttcgctttggctccatggcaaaattaaatccagtatgaaatttctcctaattaacatttccctccaaatatcaaatttatggactctaagaaattcacgtagcacacatgccagggcccgctttctttctgcttgatctgttccagctgttattagctttcgtgtctgacgatcattaatttatgaggagttctgaatgcaatctgaaatgttcccctgaattttagacgtttgagggcagactttgcatgagttcatcttgatccttgctagtatttcagtgtgctggctctttgctccacagtaacccttcagggccttcctatggtgacattaacagtgtgcagctattctttatcactgctgattccttctgtcccttacccgattagtcaaacctctacatcctttggatgcctggttggcacatagtacatgtccctaaaatccaataaggacagaagtgattagtttttgtttccctccctcgcctataactcgctggcaaccggcactttacaatggagtttgaggcaactgggagccaagctctgaaagctgcatatctgagataacttgaaaacacagggcaagatcacagagaactcgattaaggaccacgttttttaacaggggaaggcagattctaaactattagaacaggcttacagattcactgcacttggggacttgggaaggggatggtgacatgcaaatgtacctaaacatgatttaacttaaaaacattttcttgtatgataaagaaactatgaaaacagatactacaggtgaaatccatttaaaatccgaaatagtgaagcagttttctctagggcctgggcctcccagggaaactggggctacctggtacttttcaccaaagcactctgggaaagcctacactggctgcgaatcactgaaaagatctgccagtgaggggagggagagccactgaaatcaagtccatcgacgaggtttcatccagctccctacctctgcagcctcaaaagtgtctcgcatattgctttccctaacacccctgtggctgctgnnnnnnnnnnnnnnnnnnnnaagtgggggcttcgggcgtaagacagccctgggcctccacaccctcaatgatatccgagaggagggactgctatgatcccgtgtcaaagatccacaccttggtattatgactccaactatgtgggcctcctccagaaagcggtcaagattggtcccggccctatgattccgcaaacgataccgaggttcaaggctctcaaggcgacgccaaagatctgtcaatagctgtacaaccggtgccgtccgctgaccccaatgagtttacatagctgataaagagtatcatgatctacttgtctgatcaggaatgcacacacaaggccacgatacatccagtgcctggggcccagagagacaaggtgtaatccatacctgctttgtgaacatagacgtaatagctcttctacaagactatgctcacacaccagacgaaaggccaaagccggcaaggaaaggagaggaaggaaatccctccctccctcccttctctctctctctctctctctctctctctctctctctctctctctctttctttctttctttctttctttctttcttttcttctgttcctaccttctgattacccatagtacaattttatttcttggttttgttttttcaccaaagctgttaacaatgtatttttttttctatacctttgtatgtcttatagtggtaacagattgttgggcatatgacattcaggtttaggtcactaacactaggctttcctttgtatgcttggctgcttgaagttactgtttcatatgggcagcactgtggtcttgttaagcctagagacatagtggtcagactaatgggtttggagttgcccagccaaggtagaggtgagtggtccctcttcacattgcctgccccttctctgctggctggttttgttttgttttgttttgttttgtttttccacttgatattgtgtcatctgagaatggggggacctcaggtaaaaaaaaaaatcgttccataagcgccataagatcaagctataagcaaacctgcaaggcattatcttgtaagtgattagtgtggaaaggtccagctcattgtgcactgtacagtctctggattgatggtcttgggtgccatatgaaagcagtctgagcaagcctgcatgagtgagtaagccacattctttcatagcctctgcatcagtttctgcctcctggttctggctgtgagttgctgatatgccttccctcagagatggtcagttaaatgaaatgtaaatcatttcctgcccaaattgtttttgtcatcgtgttttattatagcaatggcaacctaacaaagacacctctccagagaaaaagtgtctaggaacctcacatttcctttttggaattctcctctaatggactattctgtgcttattgttttcttctaatcattttcttttggtaacagtgcagccttggatttttgaagccatgctcttgctgcgttttcttgcataatgagccactaagtgtgtgtgtgtctctaagtcagtggttcttaaccttcataatgttggtgatgtgagtcagtggttcttaaccttcataatgcttccaccttcaaatacagtttctcgtgttgtggtgatcccaaccataaagttatttttgtttctacttcatagttacaattttgctattgttatgagttgtaatataaatatctgaatgcgagatggtcttaggagacaagagccccgtgaaagggtcacttgacccacaaaggttgttatgatccacaggttgagagccactgcctgaaggcgtacattcttttgctggtttgtgtttagcattaagattccagttccaagcttcatcacttagagctgggtgataaggcggtgacttgcccttgttctcagttgtcctgcagagtaaaaatgtggtgttggtacgagccagctccgctgtacttgaccctagagttgaggtgacttggtgtgcttatgtgcgaggccacatccagattgagaagtgcggtgcttggattgttcttctgagttaatgaacttggcagtagagcggatggctgtcctctgggtacgccatgtcctttcttgtgagctgactgtattgaggaccaagggagcatctttacttctcctggagtccctagctctgtctgaatgccagcctccctttgccaaagagcctgccccgcagagaagcagcaacaggccagagactcagagcttttcttctttcccttaaaacagatcaagtgtggttttgtatcttatttatgttcttaagtgaagttttaactacatttatttatctgtgtgtcaagggacacactggagtcaatgctgtccttcctccatgtgttttcttgggggtgggctccagtctttagacttggcagtaggcatctttatccactctcccatcttactggctctactggttgtgttttcaaaaacgattctttaaaccttcctacaaaagggtatttctttttaagactcagtactcaaggaaaccttcagtgttttgaagtattggggaagtttttatactgggaatgatagtgctacgaacagtggagttggtgatgtgagacagcctcatcaggacagggtgcaaggattgctggtgtttggggctcatctcgtgttgaaacatctcttaggatctccttccaatcttgacttagttctatagagcccaccagtccctactgcatcacctctgttcactgatatagaaacagatagtttttctgagtttcaagagtagaaaagaaactcagaggctgtggcctctaatccacttaatgagctgtaatgagagttcactgtacttttgcccccaagtaatattccagagaaggaggtctgtgtcagatgaaagagaaggcttccctctggaacagaactgaagaagcaactaagcttcgtgtgtgtgtgtgtgtgtgtgtgtgtgtgtgtgtgtgtgtgtgtgtctgtaaatatgatttttaaaagaaagattccaacagagaaaaaaactaaacttttttttaatagtttgatactttattatatttccatttaattagagactagagagaaggctcagtggttaagagcactggctgttttgaggactaggagggattgccagcacccatgggtgccttacaaacctctgtaactccagttccagggaagtcagtgcccgagtctgaactctgtgggcactgcatgcatatggtgcacagacactcaggtagttgtacacataaaataaaacctcaaaacaattaaattataatttatagatgaccagggctcatttcaataagctgtaagtagttatagacctgagatggatagctgtagtgacccatcatcctacatcctctcaccttagccctagggagacttgtctgtcattcctgttttgtccttttgatagacaaccacagtagcactttataattatttcccaacttgtcaactttgagcatttcttacatttttccactctataatatgaaagttcacctttaattttttttatcactatcttcctctcttttcagtactgaatttgtcaattgacaggttaaaatcatgatcacgacgtgcatgtgggtgtgtggtacatgtagtgtatgcatgttgcagtgtgtggggtcagaagactgtatagtggagctgatgatttccaggggttgagcttggttgccaagcttgctgcacatgggcctccatctctcatctgccccttgtttgtacacctaactggatcttgactgttacgtacgcagggatcatgcatgagaatgcttaccctattgtctctcctcagacaacacggagggaggcttgtctttcttagagcaagctttctgactacctgtgtacactggcaggatctttttaggaatacaaggtagaatcttgcacatgctagaccgtgagacacgtgactctggaggggcaataagaactcatccgtcctgggcatcaacttaatctcactcttaatgcgttgtcacccatgctagaagttcaaggtggcctagctctcatggtgagcacttttcagttacagaacctggaaagagaggtaccaaaatccatacaaaacctttgcctcctcagaacagctctttctgtattttaaagaagaggcacgtaagtgttattcaggagaattccagttgctttgttgctctgctgtattttaggaggacaggtcacgtgacggatgtggacaccactggaaagtctgcccatgccagggcctcttacttggactgctgccctttttaccccataaagattgttctaggcaaatgcttctctgcaaacattctctatgtatggctttagccttgtctactttgattcttgcatcataaaaatcatcttgattttatttcattgaatgtgctacaagtacaggcttagcttcaaattctgactctgcccccacagtggtcagggctactttattgaaggcctctctgagcctctgtttcttacctatacacaagcatcttacagtctttctctatgattgttgagttgcttaaagtccttagaaggatctgtagtaaagtagtgagtgctcataattcttacttcttagtatcatttttaatgttactacaattctttattctagcttttttttttaagagggatgtgaattgtgtttgtatattctgcctctttggttaaaactgatggaaaatacaaagcatttctcttgtgccgtgaaagtttagtcaagtaacttcaggattactgccttctggcccaatgaccttacccaagcccgtatatgggccgtatatgggcattatagtatgtggaaacatagcaaggaaactgactacatgcagtaagggctgagcatatgctgtgacattgccgtttaacagttcagtttccctaccagtattttataaagatatattcactgtataaaggggtaagttttgtgaggacgtttgcatttcgagtatattatgtacttgaatgttttcatgccagttaccttctcctgagtcctcttattttccactaatttcctttctcttcccacatagttcctatctatttttcgtctacacattgtatcatatgttgtgttacatgcaatgtatgtacatatgaggaaaatacaatatttgttttagtctgatgtattttacttaatatattgatcttcaattccatcttttttttaacagataaaataatttcattgttctttatagttgactgaaactccattgggtacttataccatattttctttatgtgtttggctgttgatgagaatctaggttattccataccttggttatttaaatatgccacaataaaaacatatttgcacttgcttctgttgcaatttgacttagactcttgggtacattcctaagagtgggacagctggcatctgtacgtctagtttttcaaggcttctccatgctgatggcagtagtgcctggattagtttttattgcagcagcagttacaaggattctcttttcctctctcactttgccagcccgagttgttgcttgttttcttagtgttatccatgctggctgagttgaggtggaatttcaatgtgtgtgtgtgtttacagatatattttatatttaatcatgtctgtctctgtgtgtgcatgagagaaggttcccatggagtccagaagaggctatcatatctcttggggcgggtgttccagttgggtgctgggaacagaactctggtcctttgtctctcagtagtgtctcagtgtagttttcttttgcattttccagatggctgaggacattgaacatcttttctcatatctattgcccatttgaactacctcatcttttgagaactatctgttgtttttatcactccatttgttgattgaataatttgttggttttgtcaaacattttggatatcattttcctgtcaaagatatagctggcaaagcttttctccaaccctcttgtagacccgtggtcctcagtcttcctcgtgctgagaccgtttaatagctcctcatggtttggtgtcttccaaccataaaattatttttgttactagttcatagctataattttgctactgtcatatttctgatgttcttaggtgaacccctgtgaaatggttctttgacctcaaaaaaggggttatggcccacatattgagaacttctgctgtagactctctttacttagttaattgtttgctttgctgtgcctttaaatgcaagccctgtttgtcagttttatttcctgaactgatgtaatgttttttgttttttgttttttttaaaaacctcacctctcttatttaagtattttctttatgttttcctctagttgtgtcaaagttacagaccttacattaaagtcttaattgattttcttagagaaagagggtggggggagtgagagattgagatctgctttctttctttctttctttctttctttctttctttctttctttctttctttctttctttctttctttctttctttcttccttccttccttccttcctttctttctttctttctttctttcttccttcctccttccttccttccttccttccttccttccttccttccttccttcctttacatgtagatatctagtttttacagcacactgttaaagagactttcttttggcatttttaatcaaaaccaattgtcttgggcaggttggttttaattctgatttctagatcttcatttccaccaatctgtatcattttcgggcaagtaccatgcatgtgctgtttctgtggctctggtataatttggcatcagatattgtggttcttctagcactgatccttttgttcaggatttctgttaaaggatcttttgtgattccatgtgaattttaagattatctactcactcttgctagaaataattcattcctagagcccagcattaatccctttcaatgggcacttactatataaccaaattgctttcatgagacccttaaaaggttccaagtccaaacaccgatgcataaacttttgatgggtatatgcaaaccatatccaaaccatcataggcagtattatagtacagtaacagaaatttagcgaggtatcctgcagcaacactgagcgcatggacatttctcactctgacttctcgagttcctgttcttctacaaacgatgacagtaatggagatgggtggcttcaaagcccaggctggctttttgagcattagactctatggcgctggaggaatctgtcctgctttctcttgactttgcctttggaacgagtgatagatggttaatactaactgttaacctgataggatctggagtcatctagatgaccaccctgtggctatgcatgagggactagacagtgttaccgacgtggtctctaaccgtggacagcatcactccatggtccagagttctgagtaaaaaggataaaaggagctgagcatgaggatttatctctttccttacttcctgatgtggacgccacatggttagtgcatcttgcttctgttgctgggccttcatcaccaggaggacctgcatccccttgaactgtaggcagaataagcccgtcctcatttaagtggctgctgcttaggtatctagtcataaaaatgagaaaaatgacaaataaagtatgtattgtagttacttttggtatttataaacttgaaaaggctgacagtaaacaaatttaatttttcttagtttttaaaaaagatttatttatttattttgtgtcaatgctctgtctgcatgtaaacatgcataacagaagagggcatcggattacattatagatggctgtgagctgacatgtggttgatgggaattgaactcataacctctggaagagcagtcagtcctcttgaccactgaaccatctctacagcccccaagaaatttagtttttaatgcacagattagatttttaaaactcagcatggcgattatattgtgattgcagaataatatataaagatacaggttctcagctaataaatctctaaaaatcttcttccatactcctcaaaggatgatgcagccattccttgggggggggggggaggtctccaagcttgcttgcttatttatttatttgtttgttcgtttatttacttatttacttacttattgagggtggggtgagacaacgtttctgtagtcctatctgtcctggaacttgttttgtaaagcaggctggtccggagctcgtagtgatcctcttgcctctgcctcacaagtgctgagatcaagcaccactgcagaccagcttccaagtttcttctttgatccaaggtatatttaagaaaaagtaatccattgttgccatccaataaaagtacatagtgtgggctagcgagatcgctcagtggttaagaacactgactgttcttccaggtaggcaatcaaggttcaattcccagcacccacatgaaagctcacaatcgtctgtgatttcagccccagggaacttgaccctttctcaaagacacacatgtaaacacaatactaatgcacataaaataaagttaaataaatagttaaaaaccaaaccaaaccaaaatgcatagtggttcatggactagctagttcgctttgtgggtaaagcactttccatgcaaatctagtgactggaattccatctctggaacccacagtgaaaggagagaactgcctactgcaagttttcttttgactttcacttgagtgtcatggtgtaaattcatgcttgcgtactccattaactctgctgggccctctttagttctttgtgacacacacatacacacttaagtacaaaaaaatttttaaaagaactatatacatttcaatggaaatgtaagttaagtaagtcaactttgactaatatactatgcagttacaaaagctgtgatcattacattaatttaaatgctgaaatctagaacccatttattaaataacagttccctcctagtatctgtgtatattcctgttgatgtgtcttttctttagttttatgttcatgtaggatactgagtacattttaaggcaattaaatgtaatatactgttctttttcctatcgtgactgctgtactgtttttcaaatcaatattgccatgcaacatataaaacctaccttatttttctattggaaacattattttacattttctcaaatattatcagggcttaaagattttaagttggtgctatttcgtggttgcacttgtcctgtgtaaaaaccagaaatgtgcgtacatgagtatcatgtatgaggggtgacataatatacaaacagctttacaagtcacatctcattgagaagtggaggtggccagacctatgttatgagctttaaaagcattctgaccttcaagaaggccatttcttcctagcccttggtgttggtcttcttgaagaagcaccaggtagccccagtttcccttggaggtcccagagaaaactggttcactatttcagattttaaatggttttcaccagtattatctgttttcataatttctttatcacacaagaaaagttttttaagttagatcaaatttaggtatatttgcccaaaccagaatgatataggggcaacttactataataagcaacttggcttgtgttcaggtaaggtaaatttacttgtgtagatttacaaaacattgcacagagagaacataaaaaagaccaagacaccaagaaagtagttcctattagttcctgcagcatgtaggaggtagctgattttgttcctcttggtacccaagaaactcaagtctaaattcgctgttctgtgactctagacctgatttgtttctgcttagttttgtccaggtgtttgctttccagactgttctctgattaggtttctactcagctagtatattctacattctgacatctatagtgaaaggaagtagaatatcaaagtaatatacttttaatcaggtggataggagtgctaaggtgtcactggttgtgagcagcagccacaggggtgttagggaagcaatatgcgagacacttttgaggctgcagaggtagggagctggatgaaacctcgtcgatggacttgatttcagtggctctccctcccctcactggcagatcttttcagtgattcgcagccagtgtaggctttcccagagtgctttggtgaaaagtaccaggtagccccagtttccctgggaggcccaggccctagagaaaactgcttcactatttcggattttaaatggatttcacctgtagtatctgttttcatagtttctttatcatacaagaaaatgtttttaagttaaatcatgtttaggtacatttgcatgtcaccatccccttcccaagtccccaagtgcagtgaatctgtaagcctgttctaatagtttagaatctgccttcccctgttaaaaaacgtggtccttaatcgagttctctgtgatcttgccctgtgttttcaagttatctcagatatgcagctttcagagcttggctcccagttgcctcaaactccattgtaaagtgccggttgccagcgagttatactcgggaaataagaggcttgtctccggaggacagctacacattacgggcgcagtataatcctgaacgttgttttctttgctctcaaatggctggggacagtgagtcagaagtgagaactccctttgtttcatgtcctgtgcatggcaggggaagaatgtcgcagggcagaagatgaagaaagacataaaaggctctcagctcaaggaggtcagacccatcagaggcttagctttgccttcaaagatgcctgggacaggtggcagttcaagacaatccccactggggtgtccgctggagctgagataagggattgctgcagaaacctgctatctggtgcctgatggctttgatgtaacactgcgaacaagacttgggggagcaggcggctgctttcctgcgtggttggctgctgttgttcagccttttaaggtcttattacagtactccttgtggactaatcctctttaaggtttacacgggatggttttgtccattgaccctgcttgggaccttgatgccacctgtgcaaggcacctcaagccatttttttctctcttttctgcaagttgtgaacattgcacagcctctcttggaaggagagctgaagtcctctggctcctgctcctggttccctggctttgctgagtttatggaggttgtttgtatcctgttaacagaaccatctacattaaattgttcattgttcccccttgtcaggatttcttcctctttgcttccactctgtcccttatctactctatctgctttggggttttgggtgttgtagcacattgcctacccagacatactgttctctagaaaggtttagtaggtacatggttatgtctgcttgtgttgcatctctctagaacaccaaatttaatgacacagtgttttatctatgctaaaatgctaaacagggacagagtgctaggatttgaaccctaggcaagtgagtaattgggtatgctttcttttaaaaccattttttttttaaaccaaaccagacttgctgttctaaacactaatagggacagaagctatggatttgacttactgctttcttgatacaggatcagcaatagtagcatcagcaacagctaagacctagatctcagaagtcaatttaatcttgaattttgggtgagataactattggcttttatgttaaaatcttcaaatgactcttgaagataggcatgatggtaccttgcttgagtcatgcacttgagcccattctgtggtgtcatatttttcttgaggattagagttgttctgggagtgctgatgggacctcagagttcttaatccccactcagtgaaaaagggtgactttcttagtaactagcaagtagcagacagcttcctgtgttccctcactgtggtagtctgagtgaggtgtcccccatgatgcttatgcattggaatactctgcctgcctttgaggagaattgggagatgtggccttggtggaggaagtatgtcactgtgggtaggctttaagggttccaaagagtcctgccattcttagtgtactgtctgccttctgcttgctctgtgagatgtgagcgctctgtgctgtgtcagctgcatgctctgtatggagtattacttctaccccaatatcataggctctaattctttggaatggtaaccctcctatacaccctttcttcaataagtttcctgggtcacagtgttttatcacagcaacagaaaagtaactaatacactcactaaagggactgactgttggatctaaaactaataccaaaagtagtcatcaagtcccaggttaagtacagtctttatgctaattatgaaggcaaacctttttctaatttgacatcttaaaataacaaaaaggcattcttacctcctattgtcagtcgagtgaaagaaaagatgctgtgttatggtccactaggccatgcagaaagaaggatgtatgttgtatgtgcactgactgagagttactcactcaaaaatgaaatcccctcttgagatgatttggggaggtgagatcctctccttcatgagagtgtttgatggaaggcaaggcaatgaaatgaacacgcaaggagcattcggctatcacttagcagggcgaacccttggtttctctgacagccttcctttgaggttggcactttcatgatatccaagtcaaccttggggtcctagctaatcatgtagcattttggactcctgcactgaaacaaggaaacttgtatttgatatccacatgcaagcctacactaaatgtgcacatcatacgtacacagacctgaatataaaataatttttattatcaaatgtgattactttccctactgggtaagaatttaataccaaaccttaaaaactgtaaagaattttattaattatgtcttggtttatatttatactgaggtatcagtgtggagtaggatgatttgtataattatgccttgaaagtcagctttggtttaagaaatgcaaatacagtaccctcagaaaagagggtgtggcagagccataaatagtgccagtctacccccaccccatacacccagtttgttttttggtattttgaggcaggttcttataggtaactctgactagcctggacctctctatatgccttaggctggccatcatctgcaatgctctcttaattgagcttctccgtaattgggattgcagtttgtgtctgcatgacccatctttttcctataaatacatacatacatacatacatacatacatacatacatacatacatacctatgatgaagtttagtgtataaactggtccaacaaacaaacaacaatattaagttttgttatagaatagttgtaatagtgtatttaatattccctcttaaatagcattatacatacatatatatatacatatatatcatatatatgtctgtctgtctatctatctatctatctatctatctatccatccatcctcgcctaaaagcagtagtttatggcgtctcctggcatatctgaatccccagcaccattcatgatctgcttctggacatacttggaaaatcatagttacttgaaggtaaacatgattgtgtcctgataaaacgagaaggctgctgctgagaagacgtgggtggagcatggagcttggagtcaacaagcaagcagatgaccctcatctctgggcgacacaagatcccatcatgccaccaacaatagagtaaaaatttgagtgtactagttgcttatttctagaatttttcacgtaatcttttggatatcaagtgactgtatttcatatatcagaatgtgcaaccctgggagaagtgagggcaactacatatatccctctgtgtgcactatgacatgtactgagagcctaagcaaagaacctattaaatatgataaagcaatcacttattaatgtgactaccaaatttgttgttttctgtcaagatttaagcagtctgtgttaaaagtaagttttgatgctgttacttccagcacgtagaaataccagtggagtctggttctttctagaaaggtaaaattagacatcaaagaattagttgccttgtcctgtccaatggtcccagtgaaaaaaggtccttaatttaagaaagtaattattcatactttagacaaatccaattaaaataaataccagcagtcaactgcttagtttgatttctgatagtttgttagcacttgttaccatatcaacacagtatggttagcaggtatatcagaagttggaaactgcacatatttgtattcagcatctaaatttcaacagctaaacttatccctttattcttttttgcttttaaaatctagcagatgctctcatgtcccggtcagagcattgcacgttaatcgtatctctgcagtatgtcttttctgatgtctcatttggtacactggggattagtaagcttgggattcccctgtcagtgttaatggataattattttataaaatatacttgtttcctgcatgcttcttctaataaagaaaaggtaggtgtagatgactggctaatggaaggaagtcaggtacaatttgaaataggagaaagagtctatttttaccattgaatggctaacttataggttactggacaacttgcatttatgatctgtcatcacctagtacttctggcttgctttgagggttgaaagggtctgtgtgtcacttggtcacttggtcacctggtcactgagatctatgttagtgtggagccatttaaggcaaagtagttgaggcacagaaccatcaagtttcctgtcctggtgataccactttgggctattttgtgtttctgcccacagactttatggttctccaatttaaaaaaaaagtcttattttatataaacataaggtaatggttttataattgaaaaaaaagggggaccagttcttttctataaaatattttaaattaaaaaaaaataacagaggacaccaaagtaagaattccttacctgacttgtttttatctaatggcatttttcattttagtattcctgtgtggtcactaattcatatgtcttgatgtcacagaccttgggagataagtttctagtttagtaatccaagagttgatgtaaaagaaggatgagctgaacccagggcgaaggtcgggctgtagtgctcgtctcagacaccttccttttgatgccactgcctgggctttcgaaacagctctggaatttggttattaccgttactaaaattaagctaattctagttgcttggctatgaggatgcttctaggaaacaaagaagcaccctggctttttttttttttaatattaaatctattgtattataatgaaaatcatttaaaaagaagagtaactattgttactatgtgttacacagtgtgtgttcggcttttctagtgtagtgcccagtgccctgtgtgtaatcgttacagtcacctagatgtgtgtaccctgtggatagagaagcaggacgtggggacatgaggtctatagtccttgcaccagcaaacaggcaagctcccactctgcaagttgaccttctcttccaggggcacaaaagaaggagagagagagagagacagagagggagagagagagagtgagagagagagagagagagagaacgagaacgagaacacaaaccaatgcaaagccactgatgagaggtaggaaagacctggaaactcagcacagaaacatactggggcattgattaggatttgatgcctaacatgccatttttgtatgaagaaaaaaaggtgaattcccctcaggttgtcatttgtgatttaaaaatatttttgttcccttttgtcttgactatagtaaatatttctatgaggctaacagcacttatatccctagagaacttgttagaaagacacattttggggagcttctttactcccgacttcatcaggagcctgtattgaaaagcttttgggggtgaggctaaagttgaagacccatctggctacttttctgtatcactcttttaagtctgtcattggcattaaaatatgaaagggggcaaactctgacactagagttttgaggggactgagcgtcacctgtcttcttcttctttttttttaatgaccatctcattctgacagtttaagacccaaagccagccgtggcccaaggattcagttatgggagccagggaacataactccctttcttgttatttaaatcctttgcttatgaatctgtaacattctgagcctgtcatttgttcatctttgtcagctgtagtgcagtaatagtagtagacacttcattgaaaaaactggtaattgttgatccccaagtaatggattcctggaaacttatcagcgtttaaaaagttaagctttgcaagatgaaatcagaacgatgatctagagccatggttgctatttgagtccaggctaagaagcagtattcattcagagtgtgtccaatttcagcttcctctttatattttttgaaaggttgttttggccccttaatttaaagaaatgaaaagagctatacactttattccttctacaaggcatcaaggagagggcaataaacagtacctgcctgagatattttaataaatgctgctttactgcatcccacaatagaaagcaaatacatgcaattacttgcaaatttcttcagtgtttgtacttataaatctctgcctaacccttccctgctgggacttcagttagtcgttctgctgtggaaccagggctttgttctcaggttcagcttcagctcagtctggaataattcagaaatgtattagagaggttgtgttcccagaaggcataaggaaataaccttcagtgctggccttagggaaatcagtccaatcagaggttgggcagatttctcgattaaacaaagaactaactgtgcacaaattacacctcaacaatttgtaaggagtccacctaagaaatgtcttagagatggaaagctgatatttttttaatcagggcagcagggctgctaaagtcaaaatgtcgccagcatttttccatcactccacaattagcatccccccaaattaaatttaaagttgcattcatcagcaatccttggctttgagacccagggctcgcattgtcagatgcagatgaaaacagctgcccttgtccatgtgaggcctcagaatacagacgagtgtgctgtgagtgaggccttgcatccttgagtgtatatgactccgttcatctggaatacatcccggggagctttgggctgtcgagttttattttagtaagtttcattttgggaaccagaaagggggttgaaagttattgcacttaatgttgttgtgacttcacttgctcctattcagtttgttcagatgtcagtgccagaacctttgtcaaaatggattcctcgggaggggcctagtaggtttcagatatttaggagatctctgtacctaaccatcatccttaagactgtgtgtgtgtgtgtgtgtgtgtgtgtgtgtgtgtgtgtgtgtgtgggtgtgtgtgtgtgtgtgtgcgtgagcgtgtgcgtgtgcgtgtaatgactttcttgctgggatgtttaaattgtgttttagtagtttcatattttttaatgggcaagggactctgcttaaaagtagataggtgcccctcaacattcctacccatagtgcacatccaacccttgagctgaggttcagaaggaagttaacattgccttaagactggtgacatcgtttttggtcagaaattacagcctcaggtcctaaatgcaaagaaccaactcaggattgcaggaagggtaatttgggagcgttcagagatttgagttcagcatttgagaaaagaaagtgcaggccctgtggtggcccacagctttagatcatctaggtcagtcagctacttggagaagacactgagtgtggtttctttgtcatttgaaaggtttcttcctcgagtgttctttttctgtacatagaagtccaagcacatggacacatgggttgacagttcccgtatttaataaatgataaacaaataaatattctacatacctgaggggccacacatcacctgttgaagtattgactgttctggggcagaggtagtcattgccttcacttgcatacccactggttagcccatcagattccagtgcatagctgaaaaaccgtggttgagctcactgggtcccagaaggacttgtaaagaggaagggcactgagaggggtaggagggagagagagtggagtagtgcattatttagctgtatgaatttgtcatagatgaaacaaatccggatagaatggtaatcatgaaacctttgctttatccctttgcattactccatgaatatttttgcagcttgagtaatgcttcattgctagtttttcatattcatttactacttgatgtacagttggattgtctttattaggcaattggtaattcataatttattgtataatattgatctgaaagtgttcctggatattcactctagttgtgagtttggaattggaaacataaattatagtagtttcccatagtttttggatcatgtaatttcttaaatatattctgaagtgtgattcttttaaagattaagttataattgtttatgttttaattttattgtccatagttaatattgtattttataaatatattttgaacaacaacaaataggtcaaggccagggatgtggttgtgatgagccatgtggtagagctcttaaccataattttcaagggccctgggctctcaccctggaatttcctgttggaagggctatgaatcaaagaccaaacttgcctctcatcttgatttgttgatgtgtctttgtcacagttctttggctgacccatgttcaaaagggaagttcaaagaagccctgcctacctccaaggttgttaggcagtttctatgggatggtgtattgaaaaccccttttcaattgtgagaggggccacaagagtgacttgtgaggagcagaaggatgactttggaatggtgtccttcatcttacagccatagggaaacttccataccgctggctttgacatttgtttttcttaacagtactagcttacttgaatctgtgtccatcttagaaccttagagactcatcaacagtggtgacaaatgtcacactttgttttcaatgtcaagtgaacaagaaacttaattgtgggaatcagagagttaccaagatgtctggatatagatagttgcttcatttatttctttgaagtgtttgttgcttggaagttgggcataactatgttcacttctcagatctgcaatatgagataagagataggaaatatgaaaaattttcagcttataggtaggtatttgctcaatattagtatcagtcaaaagtattggctagttttatataaatttggcacacaaactagagttatctgaaaggagggaaccataattgagaaaatgcttctgtaagatcccgcacagtttcctaattagttattgatgggggagggcagagcttattgtgggtggttttattcctgggctggtggtcctgggttctatgagaaaaacaagctgagcaagccatggggagcaagccagtaagcagtatccctccatggcctcttcatcactcacgcctctaggttcctgctggttgagttcctgtcctggcattcattcttcagcgatggactataatagctaaataaaccctttcttccccaacttgattttgatcatggtgttttgccacagcaagagaaaccctaactaagattgtggtttttgtttgttttttaaaaaactaagtcatttttttttaatttttaaatttaatagggaatggatttttgaaagttagtgttaggaacttgttgtttaaaagatttagtattaaattcattccttatatttgataggatcttctgacagcatgatcatcaaatacattcttgcatttgcagcgtttgataatgaactttaccatttacatggacatattattaaccgtggtgttggccagctatggagacagcagccgacagccctgggctgtgtctcccagaccatggaatcctcagtggcatgtggggctggaaagccccaacctgggtttcttttaaaatggtatgtaaatgcacaccaaatccacatccatcacttggatctaaactgtactgtaaattagcatgcatggctgttgaggtcacactctttaccagaatggctttaacgtaacttggcagcttcagcataaaacatcttttgctctgttttccggcaagcacaggcaaaaagcaagtcaaaactgctttcagtaatgagacctgatctttttaaaagctagagtttcctgtgtctcctgtacccattttctaatttaccaggtaacacagtcaggactgcagtgccctaaggggaatttcctcatttaaaatcctcatctggtggtcatttttcttaaaacttggttatggcagttagtatctatgggactttttaattctttagacttactaaaaggctttggtacttggtactgcagtatgtaagactgcctgtcaaagatgggattataaagaaaggccagagccatataagggcacacctaggtcatagagtggaaacattgcttaaaaaggcatccatggattcagaggcccttcctgtagctgccctctctcccctttcccagtacccagtctctctctcttccatctggcttctctgatcagtttactgactaacatcccagcaaagcatatcccctgacatggtaatatttaaatgccaagattaaaaattaagattgggttaaaaactgaggctccccacggagccgggactctggagatactttgggcatttgcctcccatttatttaaagtgtgtgccaacactatgagtcctttgtaactgcaggggaaggagttgagatgcatagtatctgcaggccatgaatattggtaaaagtgaccattcataacggtgttgattgctaagaattactctggagtgcagagtaaaagagacttcaaaatgacttgccaggggttttgagaccacaaacttagcttctgctgcagaacgttccacgatggtgtttcagctacctgtacgtatgcacggttaatgtttatgtgtgaatactcctggaaacaggcaggagtgaccagcaaagcctaattggtttcaaatggctttggccaagtctggtgacaaagctctaccctttacactgagaaagccatctacctggctctttaaaacttgctcatgtaacaggaatcaatggagaaaatttacagacaaattacaaaatgattccatcagttagaaaagataaacaatttagttttattttttatttttgtaaatctgaaacttggacctaatgctatagatattagtgaagattttcagtttactcaaccagtttcaagggaatggaattttttaacacaggtataggtgtttttcttctttttctgtttccttggagaattttaacccatgttcacattgactgcagcaaattaacccatgtaaactcatgttctgttctttgaaattttgttgttttgattgaaccattatgtataatttaagttgaacatttcagtaagagacctgtagctgggcaggtcagacaagattgcttttctccacattcaaatttggaagtttttataaacatggtgtatttgggatctagttgtttcatcagagcaggctatgcaacattgaatgcttcagttctggatatttggcttacctacattgctgtggttcctgctcctaggactggttgcatggaaaaactaccttctgtgttcagtttgcagtagtttcttcctccggtctttgagaaagctcaagacagcctacagcaacctctatttcagacttatttttaatgtagccgtgggaagatatgacagtcatttagcactcccctccaaccccaaattatataatgttctatgaaaataaaatctttgagccagctccttcccactttcaggtgggaagaaatcacttcagatcacatctacctgtgatcatcattaaatgacttcacgcacagaagaaattttgtttcttctctctgagggcagcatgaagttttcatccttagggaactgcaacaaatctcatacttcagtgagcttaccagaagctgaaaggtctacagtttgtatgcaaccttcatacatatcatatcacgtgcctattgggattcaaaaccaaaaccaaaccaacacattgatggtttatgctgtgttccacttgcagaggtaaagacgtatggtttgttcctttatggagagctatatcttctgcttctctgtccctgcctctgctattgcaagtacactgttatacttttaattgtgcttctccttattgtgcatgtacactcacacacacacacacacacacacacacacacacacgcacgcacacacgcacgcaggcaggcacacacgcacatgcacacatggtgaatttctgaggtggcttttctgggcaacacatgacacactgggagtctccaccttcattgcagagtatgggcagacatgttctcaagcctttttactctcatagccagtcaacctttcagacacttggctaacatgacgccacatttgcattgctcaccagggatgcaggccgcacactgcctatcccatccttccttcatccctgttatttgttactggttacctcttctttcatggtccatgtagaatgtgtgctttcttgccttcttatgaattgggggtgactttattgcttcttttacagatccgaatatttattgcctttagactttttagtcaatgaattttgctcatcgttattattgttagaaagaatgttagaaaattaaaattggtggtattattttctgtagccatgtgaccatataaatctaaataaagtctttaacaccatgaaggtgatctacttggagaaccaagacttgtttttttaagacagttcatgatattggggtgtaggcgtaaattttgcctccttagtgtttgggcatcttcagcatcctggacattgacttctttcaggcttctatgatcatccttcattgattcttcatccatttgccagccctcaagctcttttctgcatttctatggtgttatagactggaccaagacaactgtgtttctacagttgtgctgggtcttaccttttattctccattctcgtacagtctttgtgaatcattgggtgagtcaatgcttccttgctccaagaaatgtgtgaaacgatcgtctaagaaggagaaagtctgatatttcctaatgacttcggaggtccagtccatggatattttgcttcattgcccttaagatcatggcagggacacatgatagaactagttctgttgaccaggaagagtagacaaggaagagatggtgtcctacagttccccatcagtgaaagtcctcctttctagtactgtaagctgggagtccgacctttaacgcatgggcatctgggagatcctcaagacctgtattaaagctgtcacttgaatatcgttagtttctcagcctgcacacaatgtttgtgattgcactgagcagtcacaataatctgaaaccattatcgtctttgtctgtgctcattttcctggaccaaagagtggaacctgaggcaaaaccaaagaggactgaactggcccaggagcaatggtgtacaacttcccagatacttgatgctttagcactggtttctttctgctgtaactcgtgcacctgaccttgactgttccacatgtgtctccctttggcatgcttccttgcctagcttccacctgtatgacattttgaggttatagcctccacttgcttcttgatgccctgttgatgcctacattttggaatagcctcatttttcagttcttcagtcttactgtcttactcctgctttgttgatcttcttgaaccccccaccctccccatgcaaccttaaaagtgctggttctttgacaaccttcctagttcttggtctggcctacagcagccctgctactccaaacttatcagcactctgctttctttgggtcgtccgacttttagtagatgtgtctttaatggggagtatcagttacccactgttgaatgaacaacccagacaatgatgtttaccttgtggtgctctcatctggtctggtgtttgcttccaccaaccacatctggaacatgtgcatattctaacacaacatctagataggtatgtagcaaggtctccatgttaggtctttgccaatccacatctcctaggaacccttcccacaaagtttggtttggatgatacttggtgtttatttctgctagctctgtagtaataccttttcctattacaactactaccaatagtaacagtgtagtaatctaggcttgaaggtcatgaatagtgtttcagcatttccataattcttggtaaagttgagatataacccaagtgtctgactcccagagctgtgccttgctggactctgttgctaccttgcctacattgggtgcccactgtgctctaagtaataaaatggccttatctttaacagaacaatttatatgtatacacaagttcctttgtgaatttgtgtgcaccatgtgtgtacaggtgcttgtggaagccagagagcatcagattcttgaggactagtgatttgcctgatgtagagacagagtgctgactgagtctgctgcatgagtgttgaacccttgagccatccccacccagctccagggactttacgtttcaggtgtatgcctatgaaaagaaacaaatccagctggtgtgattgctcattcattccatgtcagccccatccttctctccacccttggatggacggacttactttctttcttcctttcttccttccttccttccttccttccttccttccttccttccttccttccttccttccttccttccttccttccttcttttcttttttcttttttctttctttttttttcaagacagggtttctctgtatagtcctggctgtcctggaactcactctagaccaggctggcctcgaactcagaaatccgcctgtttctgcctcccaagtgctgggattaaaggcgtgcgccaccaagcccgaccttggtcattcttatatgtagggccagtttcctttaaaataactttattttcatagtggtttttaaatgtgatggtcagcagcactgagcatttacaaaggaagtagcagcagcatgaattgctatgtggcacactttccatggtcctgtgctgactctgtgatgactgggtcacgctggctctcttcacacctttgggcttttcttcccttgcactttgaaccttcgttaggtaattgtgggtttatttgatatttctttctttgtggaagggagcaatcacctttgtgctgttgatattgcctctggagtaactagcagacagtaggaattcaatcaacatttgtagaaattcagataagcaaatgaataaatcctgtatgcttaggcctgtattctcatttatgtatcctgtgttagattttcgtgaaagtctgtggcaaagagattgtttttctagtgagtcatatggtaaaactgagaagtttattcatgtagaggaattataaactgtggacacatttggaagacagatgaagacagaagctagttagtttccgtcttgagcagcaatgactatggctaccttcaggctttagacttattcttgctattagaataaaacaagaacttagataagatagctctgcatattcctcacatttcattttattagaaaagtggtacttgatttttttctcagaaaataaagtaactcagacaggcagagctaataccctgtaaaaaaaaccgctgtacacaatatccagtgtcacttttagggtgccctttttgtcttttccctgataagccctatggttttgatgtgtaatttatacctgatcaggagcacctcttcatcctatttattgattcttccttattctgaaacctcgttttctatactattaacttctgtttcaggaaagagatttttattgatgaagaccatttccagaatagggatgtggctcaatgggtcagtgtttgcctagtatggctaaaactttgggttggatcccaaatgggatataaatcaggcctgtggcatatgtatttatctcagcactctggagatggaagcaagaaagtcaggagtttgaggtcatccttgagtgtgtagaaaatttgaggccaagcctgggctatatgaaaccagggaaataggactaggtgagatggcttagccatctcgatgccagtttgatgatctgagtttgctccctaagacgtgcatggtagaaggagagaactgactcctatagattgttctttgagcctcctgcagcaggtgctctccattagacccaaagccttggctctttctgcctgagtgtgtgtgtatattactttttacctgtcagttcagatatccatctttttttactgtggatatctaagtttctaaggtttcctcttggggccattgggccatatccacttggatatctgcaatatatcattatcttagtacagcccatgatttttgtttgtttctttattgggtgtttgtgaggtcttgtttgatttttgaaacaggatttctttatgtatcccttgatgtcctggaactctgtagaccaggctgaccttgaattcagagagccacctgcctctgcccctgaagtgttgggattaaaggcatatgccactattcctgactcttttgtgtgtttcttaaattttcgacggtgtcagtgtcacacttttaggaattccgtcttttaaaatctggggtttactctcagtgcaagcttcatcaggctttcagcagctccgactacacctaatgtgcacagcttcacgcaaaggacaggaattgcggcatgggatgacgatgctagagcaaagtgcttctggtttccttggaattctggcaggaacagaaattctttcatttgatgcctgaggtgttgttcccttagtcttttagggatattttctcaggttaaaccttcatgtcactaaagagaatttcaggataagccagtatgaagcagagttgtaaagtttactgagaagtttgatgtagattttagtgggagattaatagaaaggcgctaggaagaataatgacacatactggagaatctgggtgtggcttttctttgccaagcatactttatagtagctctttacactgtgttggtagcttttggagttgcatctttaagagtggctaaggaagctaaatgcaattatgacgtggttcctatgcactggacaggattacagctgataaggtcacttaggctgcaggggaagctaagatgatcttaatgtaaataaaggtctagtcttgtttgtgagtttcccacaaaatatctgggaaaggagttaggccatatctgaaggccatacattcttataaccttatctagattcattgctatttcaattttgtttttttttcttggtagtcttgcagcagatgctgttaattgcactgtgattcatgatttcggctgactccaaagtgaggggcctcctttctatcccgatgaccccatactattctttgttttttattctatctcaaaacaacctaactatgagggttaaatatcagcgtatgctctaggccaaatcacatgtctgtcaaaggatgggaaggacccaagtaggtacttgacagtgggcggtttaatctcagcaaactatgccaaagaggctggtccccctagggagtgggtgtagttttctggctcttatagtacttccgttcatgatttaatctgaagttgctggttattatgacatttcatcctcagttcatgaggactgaggaaggtcagtcgaccctgtctgtggaactggcaacattccattaagcagacactctctccggctcaccacacagtcaggtctgtgggagacttgatgttcccattagtcatccagacgcttatatcatgtggacgtcacccctttacgtcctctgaccccaggaccccctgatgacctttcacttcattttcaaccctttgaggccggaaatgtgggaaagcagtggatgatctacagctgtaaagtgcaggaaccctgtcttgactttcaggcttatcctgaccaaaagcgtgctatgctcctgaggaggaagagtgcaagtgtctgctgtaccccactcaagaggcctctttttttttttttttttaaataacagtaatgaaaaaatagaaacaaaatgtacttcaggttgcaaattctgagcagcatctctgaactcacagacatgctgtggttgcagaatggttgcaaagtgtctccagagatagcttcgtaagcttttattacacctccggccattgattgcatggctttatcctactctccaatgtggaagaaatactccacacctcccattcacaaaaaccctggatcagagccaccttccctctgccttctgctggtgccagctgcagctctgtctcctggcttctcactccttcacagccacggcgcacttgcacttcctaggccgcaaccagtgagggttctcgccacactcttaacttctttcctgtgctcatgttcaagttggtgcatagctaccaggttccttttacctaccctggggatttcacacctcatttctctgcgtgactccccattgttcgtgatcacagaattattgaattccaagtaattactagatttttgacaatcaaattaaaaaactgaatgccttagaagagatcaatataagaacatggtggctggggtagggttggacaatgggaaacacacacgcacaaacacacacacacacacacacacacacacacaaaccaaacctgacccaaagcatctattttctcaaagtgtaggaaagaacagacttaaatacagccatatattttattttgcattttttgacggggggtgggggtgggggataagagtctcatggagcacaggctggtctcagattcattatggcgtcaggcattgtggccttgaactctagttcctcctgtagagtataaccagggttataggagtggctcaagctgagcttgaggtcattgtgttaaagtgagtaccttggactatatgagacattcatcacttttatccccatttttctcatgttgtctctgttcagtcaatgtaattacaggttcctggccagtatttgaaggttattactgcacatgactcccaaagactgaacttttctttcctttcagcagcaatgtagaaagaaaacccgcaagagaaatccaacttacctgcttagcaggctaaccagatatggcaggggtccttccctgcacacataaactgtgctgtggcttgaggatcgtgctgctgtagctgtggtgaccatagagtcgtcagcctgagggacataaagaagtgtggggttaccagccactgcagagttttgctggagcgactagggtgggaaacagcagaactctggctctcgtagagctaagcacctgcgagcatgttcagcctctgcctttccttgttgtttttattatctccttttttctagacagtgtctctacgtgtagtcttgagtgtcccggaactcactttgtagaccaagtctcccaagtgctggggtgaaaggtgtatgtcaccaccgcccagctattgcttcctgaagtgcagagaacaaacttatgtacttgataatttggagactgctctgtttgagtaaggcaggaccaccagtacaccaatttcctccatctgcctagcagcccccatctctggctcagttgactgctaaagctttcagcctgcttggcagaaaactaacattaggacctagaaaactctcttcagtgaggtatatactgaaaatttgatttcccctgtggtgagtctgggttacttgcatgagctcatgcaacttggccgtgacttcatacctcactcattaaaattatcctatgtgactgctgacggaatatacccagacatgatgaggtgaagttgcctctgtgctggggaaaactcatttcagttcaacagatgcctgcagagagctgcgttctcctgagcaggcctgttgttagacactcaggggcctgcaaggactcgggcctttcaggctgtctaatgctgctgcttgtcgaagaggaaacaggagtgcttatctttcactggccatatatttcctgaaaaggttattttgtcatcattatttgctttttgttgcaagaacatataatgtagaagagcttcactgacaggctctctccatcctcattgttcttatgtacttccgcacacttcactttcttcacactctttaatgaattaaatatgtgcttccgggaagtatggctccttctggggaaaaatagttctgaggattaaaaaaaaatgatcctttaatttatttatttttaatgagacacagaaaaaacaagtaaacagagtctattgtcattttgtgctaagatgactaagtcctggccttatgcctccttgctcctggctctttcttatctgatagactcctgctgcagtgtacgttacaaaacagagcttcaggcctggtccaggcaggctgctgattctgttgaaacctctgttttctaatctataaaataaagattgagttttacaacgttatgggaaaaaaatcagattagagttgtttagtttcttgcagtatatctgtcttagtcgacttagattcttggtccaaagtcccatagacttgttggctcacaaacagtagaaatttagtcttctccattccggaggctgcagagttcaagatcagcacagatgtgctggggtccgttcactaacttggaggctgttgttgactcctttctttgttctccggtagtagtagggccaagaacctctctgagacctgcttttataaggagtcctgtttatggggattcagcatttgtgacccaatcacttgtagaagtgcactcaaaatactatcacacttagacaataaggtattgtagatatatttctgttgctatggagagacacaatggccaaggcaacttatagtggaaagattttcttgggggcttatagtttcagagagtgaatccatgactattatggtagggaacatagtagcagaaaggcagccatagcccttcaatagtagatgagagtttatatcttatccatagcataaagcggaggtgtgtgtgtgtgtgtgtgtgtgtgtgtgtgtatgtgtgtgtagttaactaggcatggcatgggcttttgagacctcaaagcctgtccctaatgacacaccatctttttttaacaaggcacacttcctaattcttcccaaatagttccaccaactgaggaccaagtattccaatctatgagcctatgggggtcattctcactccaaccaccattggtatcagcatgggaattgtggggaacacaaatatttatttttaccagtcttgtagctagagtgtttccctggatccatccatcttaaacatctgaaagccatgaattttgctattttgagatgtatgcttattaaatgatagattcataatcttatacctaattgactggtaaccaggggtgatcttttaattcagtaaatatttggaaatgcccactcaaagctagattcctttctgggtcaatggaaatcagagattatttaggaagccccggtcaccccttcccccgccctcatgaactgtctgctatacactataaaagtggaaggtgctagaaataatgaatgaacaaagcacaagagggcagctgtcaggtcatgtttaaccagggtgggtattaatgatgttaggtagtgagtttgcctaggtaatttctacatgatacatgtcacctcttcttccatctgtttctgatgaggatgtactgtcccctatcaaagaagccaagtttaagattccactgagtgtgttgcatccctcacttgtgtcctggttctttgccactactttactatgcagtggtttattccttcaagctggactcacaaatatcctcctattcatggtacaccccacacccaaatgcatagtactccaaagatattatagtagatggtaggaaagaaaatctgtcatagtttgtaggtatccctgtcaaaggcttagtcagcatcctgcagggctaatgggggtggtgatacctctttgacggggcttagtggcaggaagtcagatcactgggagcatatgcttgagggagatccctgaatcatgtatcctattgtttttgctttattgctgatatcaggtgatcagctttctatgctgagttccgtcatgatgcataatactgggccacaaccatgtgcccaccaacgagagattgaaacctcccaaaccaagagtcataatgagctaaataaaatcagttcatcagctgggcatggcagcacacacttttaattccagagctcaggaggcagagataggtggatctctggggccaacctagtctacaaagctgatctatgacagccagggctattatacagagcctgtgttgaaaaacaaaacaaaacaatcaatttattgtatgcatttgttacatcagtgagatgttgactaacattgatttgagaattagactattatctgtacagtgcacacttgtgtgtcctggggctctctctctttatactgtctgtactgttacttacaactactgccattctttatcaggggatggatagtgttttactcgtacttcttaatttttctgtctcttcccatgctcttctgtctttgaagcttgacaggtagttctagagccccatgctagcccctgggtgattttgggtaagggacttagccttgtgccccagtctacaatttaagaaatgaagattcaaatgtctgcgtcagaaagatgtaaaaaggaccctgtgagatcatgtgtagagtacagtgcttggccagggagtaattgctgaaaagcggacttgcagagatgccccccaattatcttgcagaaccaattatcttggttccccagttaccatattgagctgctatcagaacttggatcaaagcaccatcttgtggctcctagctctgcttccatcctaataggatacatttgatctttgaatcatttcactggataaattggagattagaaagaagttcagttatttatggcattacaggagggcttaagaacatgcctacaaatttttaatactgtagcctcaaaaggtaggacttaattcttttcttaagcctatacttaaaataccctacttctagcagataggatggcagaggcaatgagttgtcacttctgtaattacatcataggcctctgtcaatagaacttgctaggatgataccaggggcttggaactctctaaaactctgagggtcgatatctgcaagagcgcagaaacaggagagatggtcaggccagcaggaagcacggctgttcagctgcttgcaccttcttgcccatggtgcaggctgttggtaggccttgcctgctagctctggctatcccacagagtgaagcagggttatgatatcttaacccatcctttatagaaccaaagtatagtaacacagaagtaattctgcaaagtatggagaaagcattgtggggagagggcataggtacttcatacccacactgtgaaaacgagcttctaaacaacaaccaaaagaacggccactacaaatgattttcctcaggttttctgagaatttttatactcttcgctgtgaaaattcattattaattctgccacagtagaggttatgtgccctcttctccattagttccaatgtagaattgccttcagaaaacaggctgtgagaaagcccagaagtacatgcttgctgggtctttgagaacagactgctaataataggatcatttaaaaaatagacagtcatttccatttactacaggatctaatcagtccattggtcaaggtgccaccatagtcaccatccttctgaaactcctagacaggctcttttgcctcttccaccttctagaagttgcaggtgtcccttggcttctggtagcatagctctgttcttggactgtttatcgtgtttagctccatgtgcagatctacttcttctgataaagattgagtcactaaattgtgaacactgagaatagagtttaatgaattcaaaggacatgatcactcagcataagggggcaataagataaacttttggtttatcttttcatttcctaataccagattttagctttcagctaattaaacatgccaagattgttaataaaacaactgtggtttttttttgttttgttttgttttttgtttttgttttttgttttttgggttttttttttttttttttttgctgaaattggtattttgcagaaattactatgtggataatttaaacttaggctgccttagttcaactactgcttctaaggagatcctcagatttgctaaattttacacagtggaagctcacttgtatcatgtttctgcaacccaagtggccttatggtcaaggaagtaaatgtagcaaggcccttcttttgcatctaatgctgaagaagggttagcaagaagatgtgagggagagcacaaaatcagactgaattcagaataaacccacgccgtcttgaacggcctgctgtgaaaacattgctcttagccctagcatgaaggaaattcccaaggagttcttaaagatcctacctgttaaacacagttattttggctgttgggttccagagtgagttttggaggacattcaagcagcacaaagagcctgaaagctctgagcataacatcgtatccccacgtggactgatattcctgttcttttctcagtggtaaagaggtacacagcatcccatcagagatagatgtgttcctggaagaatgtctgtagttcgttgctttaacgaatgtctttgaatccccaagtcatcctggtgttgtcacttctttatgcccagttgtgttgtctcatccttaacacagacgagaaaatggatagaaagtgtatcgattgtgatacctgtcatccatcctgtttgcacctagatgcgatgagagttcactgctgctcccatggtataagcactctcagtttggaatttctgtgggaaacgcttagcaaatccattcattaggaaatctagggcattttgaagttaagcaaaatgtccctttaaaattaaaagaagggttggtactgtggctcagtggaggagagcttatgtgttttgcccaaggtcctgggttcagcctatggtaccaggagacactgtcatgaatgagcttcataagtgctttgtaatgcagggcagacagacaccttcctcagttgatgcagcacacagaacattgttaagcacacacatgctagcatcacatttggttttgactcctgatatgaactggagctttatgccagatcctgtatcagaaaactggactggccttactaggctctcctggggactgtctcccttagagccctttgttgtgggttccatgctacacagaagaatgtaatggagtctgtagcaaacagtttgaatagacactgtctgaatatgattaaaattagttttcttttctaatttcttgtgcacatatctttccctgcttttctgatggctctatggcatacttgtgccccctctccctggtaacaggagggagtagtgggaaatgtgggtgctttagggccctgaggttccaggtttagatcattcttcttcctgtgaccagctgtgagaggcggagttgttgctctccctctgtgagtacaagtaccttctgggattacaaagaggaagccatatctcatggctccttccttggttgtgggatctgaagggtagcagcactgagacccttcaatgatatgttgccatgagaggcatagggacactcctgtcaggatggggagaatggtgtagtaatctttaaaatgtcaatttttcatgttcagatgtgttatggagtttagatcaataaataaaacttgtcaaataatgtctaagagctgaggctcagccattgacttgggacacaaagggcttaggtagggtgccgtgctcctggcccaggagaggactgtggtggcctctgaatggcacctgttctcctgtccgcactctccttgttcacatgagcccaccgtgcctggggtccaatgcctgctggctttcaggtccttcatctcccactccagcctctctatcttccagagagaataactgtctgtaatagggtggctgtgatagatgctgtgggaattctgagtttgggataatgagctgtcatatgtcatttcacttaaacacaataatacaaatattttgatcaaacattttctccagctgttgagcgaaagcaataaaaccagcgggagtgccagtgagtttgctgctgctgctgctgctcctcactctattccttcaaagctgttacctgttaaccctttctgtctgtcactcctcttgctccttttcctgccttcgtggaattcttacacaatgctcaaacctggagtatagataaactgaagataaggataaaaaggggttgaaagaaacagtcttggattttcccagcctcttgtaccccacctttagacccctttctttctcattaggcagagaaatacacagtttctatcaagtatcatggtgctgaaggcatcctgtctgcttgctctatagacagtcagggtgtgaacattctgattcccacaggccaagactgagaggcaaaatagcctacccacttgagcccccttgttaacaactccagttcccattgtgaaggaagtctctgaactcatccctatgatgagccttgctgggtttaagtttcacctgctgacactcagaggcactttgacacacccttcagagccactttcttccctttctgtcacttcccccttcactcttggggttttgtttgtttttttcagaggtgaatgaatcccagctaatatccatcctctctggagtttagagctcagggtgcttggcctcactcagacctgtcactaagtcttcaaacctccactttcagcacctctgcttccatgtgttaggtgcagttctgctgacaaccagacctgaactaggcctaccaggacacccctggcctagcatctcttttgtctacacctctgctctcagtctgactcctcaaacaagagagcatttttggtctcttgcagctctcttctcagcacaacagttccctgtaaatctgaagacaccttcgaggaatagcatcctctccttagcaccttggtagctgttgcctacggcttctctggagccccagtatttctgtgtctgttattctacaccccttgtggacagatcttcctcatctgatatcattattacactccctgacggggtatcctttccgatgattaggaggacagacttgacttggctgtagagttcctgccctggatgggcttctcttggatgtctgcttggcatatggaaggcagatcccttgaatttccagattccagcctgaactcactctttcctgtcccttgtcccatggctctggctcccagtataccactggcactggcctgagccacacacagccttcgtttcttttgccatctttattctctgtcctttttctttacccagggatgcctttccattccagtgacctccattcccacacctccctgaattctgagcctttttctctcttgtctctgttcactggaacatctcgcatcaatctgtaactgtttgaaacatattaccaccaaagcagtgctttataaagtcacacctatctgtctcctgactgtccctccttggtggctggtacagtccgcaaagccttctgcagcatgccttctctttcttccaggatgctctgaaaagacaggtctccaaatgtggttgccacagggaaggcataaggttattagggaacttagagattccctggattaacctggcctgctgattgagaagcactggggtggggctcatcagttctcattttaatttacattgctgggggtttaaccatggcttagaggttgttaggcaagcattctatcacggagttataccctagttcacacttggcattttagttagttgtgatatgaaagttatggaagttcttggtggtgggcctaagaataggctccctgactgtatcctgtggagatggatggatctcctctgtggtccttctcatctctgaatcagccttcctatgaggggagtgagtctctgaccctctttgttagctgtttctttgtaccttatttattatctttcttgtcatgcaatcacaatttgagctgctgtgcctcttgggactcagagtcaacatgttcttggggcatctgggaatgtgcctgtccctttgagttcccaagatccaacagtttcgggaagctgggagtgctggtgagtctgtttttggaattatattttacttacatattttttgacaacttgagttctgaggtatttgcacccaagcagcctagaaaaaaaaatcctatttccagttgtttagtcagatgcagatatttgcacccaaccaatagacagaagcagctgacccctgttgttgaattagggaacactgaaagaagctgaggagaagggtgatcctgtaggagaaccaacagtctcaattaatctggactcccaagatctctcaaacactggactaccaaacagacagcatataccagctgatatgagggccctaacacacatactgtagaggacttccgggtatgtgttcattcagagatgatgcacctaaccctcaagagactggaggccccaggatatttagaggtcaggtagggtggggggtggggtggggacatccacgtggagacgggagtggagaggatgtgtgggatatggaatagtcagagggtggatcaggggtggggggaataaaatatggagtgtaaaaacaaaacaaagcaaaacaaaacaagaaacccttaagatccaaagttggcgtacagccaaaaatgattgtttactgagtgtggtggctaatacttattgtgaagttgacagatctagaatcatagaggagacaagcctgcaagcatgtctgtgagggagcttctaggtttggttaactaaagcgagaaggaattcccaccttaaatgtgggtggcaccagatcatgaactgggtttctgaattgaatgcagagggaaagtcaagctgagtagaacccttcgccctctcttcttcctgactgcagatggagtacagccagctgcctcaaactcctgccaccctgctttccacaacacaatgagctatggcttcaagctctaggccaaaatagcccaacccttccttctgtaagttgcttaagttgcttcttttaggcattttacagcagcattgagaaaataactgaagtcaccaacattatgaacatcctgtggctcttccatgaaacccctgtgaagcctcctgctgccccttgagtaccagactctccttgcctcccacccctgcttctcctgtgcgagaagcaagtcactggccctttctgtccgacctgttcctttgctctcacagagaaatctcctagagcttcatttctctatagcctgtttctggttcccttaacaagataaagcagaggtgcagctagcttttggtatattttaacctcagccctgaacttatttggaccactttgtgttcacttctggtattggaaaggaaaaaggacattaccacttgggtcatgaagagtgcctttcaagttcccaggcagaagcatcctcttctaagatcccccactattgtatattttttcctttatagatttattgcattagcatttaattactcttcatgacagtattaaattttatgagtgatttatagttttaatagagtcttgtataatttattgttcttggcatttaaggtttacaaaattctaagagccatgggtactagaattacttatgtccagaacatcaacatgggtgagaccccaagtaggccagttgcactgccaccctaatcttatttgatgtcactgcccactactgtgatgtgtgtggcactggaagtaagtgcatttgcactctcttaaagaaatattacttctttccattttctcttggtgtgcataagagagactttcttttcccatcaaaggcagctagcctgacaaaagcccatattccctgaacctggcctttctcctttgcactaataagtggatggtgtcagagtgtgagatctcactgataaggataagacatcacacacaacaaccagagtgaggaataaagacagaagtcatcttggccctgtgtgcttgccacttgtttgggttctcgagcaccacttttgcaaaagaatgaccttgctgggttacttttgctttgtgtgtttctttatgtggtggtgggcaggtagtgggtagaaggcagggatagagagaccaaggcttttaagtggagatcggtatatgactggatggcatggaagtcccctcccaccacaatggggctccaactttagttcttgagtttgatggtagttattctcatctactgagctatctcactgtcctaacttttgttcttttgcatttctctctctctctccttatgttcttttggctagtttggaactcactgtatataacatagtctgtggacactttgccccttcttagaaatggaaacaatcacccatggaaggagttacagagacaaagtttggagctgagacaaaaggatggaccatctagagactgccatatccagggatccatcccataattagccttcaaacgatgacaccattgcatacactagcaagattttgctgaaaggaccctgatatagctgtctcttgtgagactaggccagggcctagcaaacatataagtggatgctcacagtcagctaatggatggatcacagggctcccaatggaggagctagagaaagtacccaaggagctaaagagatctgcaaccctgtaggtggaacaacattatgaactaaccagtaccccggagctcctgactctagctgtatatgtatcaaaagatggcctagtcggccatcactggaaagagaggcccattggacatgcaaactttatatgccccagtacaggggaatgccagggccaaaaaatgggaatgggtgggtagggaagtggtggggggaggtatgggggacttttgggatagcattggaaacgtaattgaggaaaatacataataaaaaaatattaaaaaaaaaaaaccatagtctggcctctaactcagagctctgcctgattcagtttcccaggttctgggattaaagtcctcatgcttgtgttctccaaggcaacagaatgtagctcatctgatttttaaagatgcaaacagttccctgagtcttacatcagtaggtgtgactgggcatctcttgtttagggttcctgcatctttagtcattctccagatgcacagggatggaagaagttgttcataagcctagggctctgtctccctctgtaaaaggcttccaggaccagggcagggcactgagcatcctatgggattcagtaggttttgcctgttttctagcactgcatccgacctcagtggtctgttggctgttctgttctaggggctctggaggggaaaatgcagactcagccctgctcacaagcttcccggggtgtttcagtgcatcccacataggagccttcccgtcctgtttagatcctgtgaattcattgcagggtctgtgctcttgtctgttggaaaaaatatcgtattattttcagggggcttttgtttcattattttaagtagggtccaacaagaggattatgtctcacttttctgtgttcgtagttgagttatatcaacttgcagttacagaataaaggtaggtgtgtgtgtgtgtgtgtgtgtgtgtgtnnnnnnnnnnnnnnnnnnnnagaaagaagggaacatagaggtagatagaagaataaatgaacacacaaaagaagagaagagatataagaagaggagggagagaaggttataagagagagaaagaaaggaaaagaaaaaaagataatacatgtgaataagaaatatatcagagatatgatgaagaggaaatagaaagagaataacataaaatatatgatcgaagggtatataaaaaaggaagtataaatgataatatatagtatgagaatagaaataaaaagagatagtaatatgaagatataggagatataaaaggaatagaaagagataatataaagaaataataagaaggaaaggagaatttgtcagaaaaagataaaaaaaagaggaggaggaaaagagagtgaatgaggaagatataataaaaagaaatagaagatgaaaagcaaaagtaaagagagaagagggggataaagaagaaaagataagagagaaatgaaagaagaatataagaaagagaagaaaaaaagaagaagaaaaaaacaatagaaaagaaagtgagtaaggagaaaattaagaagaagaaaagaatgtatagaaaaggatgaaaaaagtagaagaaagtaaagaaaaaaaaaatataaaattgaagaataaaaagaggaaaaatgaaaaaaaaaaaaaaaaagagaggaagagatgaaaaagataaagaaagaggaggagtaagaaacaaaaaaaaaaaagaagggaaaaaaaaataaaacagaagaaggggataaaaaaaggaagaagagcaaaaataaaaaagaagaaaagagtaagaaagaagaaaagataggaaaaaagaaggaaaaaagagaaaagagaaaaaaaaaaaaaaaaagagaggaaagtacaaaaaaagaaaggaaggaaaattgagaaaatgaaaagaataaagaaagaacaaagaagaaaatcacagagaagtggataaaagaaatataaagagatagaaaataaaaaaaagataataaagtaaaaaagacaccaaccaaaaaataatatagaggtaaataataaaaataaaaatatgaaagatgtaaataagaatataaaaaaaagatgaaaaggggagatacacccacacacccactcttgggctcagctttctattctcttttggtgtggataatcctcaagggcccttggcccttagggcagataatctcttcagggttatctgttaattaccgctgaatgtgtgaaatatttgtgaaaaggcttttcaagtgagctccatgctctgctgctgctgctgctgctgctgctgctgagctcttacactggcttcagaggctgaggtttccctctcagcttggttcccttcgagagctgtttgcttttctaatgaagtgagctgtttgtttgactctgtggtggacggtatttaactagggactaaagtaaacctaggggagattcaaataagccatgcatatctgctttgtgaagggaaggcaaagagtttggcctccctcacctccaggaagagtcgttaagaaactgtttaaataataaactgagcagagcaagtagagattgcctctgcttgtcctagggcttttgtgttagcccagctggctggcctgggaatcacttcagtggccacaaggggaggagagagctgctcacttcctgcagttagtaattgttgtttatttatgtgtagagattgaaacacaccctctagtcctcaggatggcaagtgaatggcaaggcaatattgtcatcaatagccaatgtcctacttgcatcctgactgttgtcctggggtcttcattgtgtcctggaggccaagctcatggttttagaacaagttagatccctgttgcgttgcctgaggtatctgcatgataggacaagagaatgcatgattgaagtgtaacactggtggaccagtggcttgtttagatgaggtaggtagctgctgggtctctatagagggctttgagaggagctagctggcaaggttactcacccagtcaagtagaaaatgttgtgccctcagaaaccagagacctctgagggctccctgagagcaggcccagggtcacttaactcccaaggaagaagagtccccagaagctcccagctaaatagtaaggtttgttgacacccccagagttttcactcccccagccctaaaagcagaacaatagtcctttgaatttcttttggtctgtatgactatttcaacttgtgttgcctccaggaaacagggagatgaaaggaaaatgaagaccagctatccccagtagacatttctggtttgggagcccaggcgagatgccatggtccttaccatggagctggtgcactaagagttggaagattgaaaataacgtagaatatattcagcattccgtatggaattcagctgaggatcaagatgggaagccacatggaatagtgatgacatctaaccaaggagggtctgtagagaacttgagggagcaaatcttagaatcgctggatcagacaggcatgcagaaccttatgggcttggtatctatatactcagataagttttgaacagctatgggccagacatgggtctggagaagttgctcttatgtagaaagaattttagaatcccttagatgataacatctgctgcaagcccacatggccaacatctttgaggacatctgcagaatatgtgactagaggctgattcagaattgcggcggaaaggaaattaggacgggttttcctgcttgcattctcaggagccaagcacgcgagagggattcctttcccccagcactgggggattctttcctttctctcatgtccttgtgcgtccttgaaaagcagcctcagctgtactttataattttacagtcatggtgagagaagctcctaaaataaactcattgcttaaaagctttatgtgttcctgctagacaatgagagttaagagtttaaaagacaagaaagtggggtcttttttaatgccctcagtatgcaataaacatgctggaatttcagtggaatccaaaggctcatgatgctagcatgaagagcaagcctttgatgctattgacagaaagaggggagggacaatagggcccctctcatttttttttcaggagcctctaaacttttgatctctaaccttttgtgtcaaggaattccttacagatgggtattagcagcctggtcaagtatcctgaatgcaccagagcattaacatcttcttggtggcaaaggagtcttgaaaattttttactgcccactgtggacaataaatatcagttagtaattatcattatatcctaggcttagctaggctgtcaaggctagaatgcctcaattaagagtctgaactgatacaggcagaatattttatacactacatgttaggcaaagagagggtgatgggtccatccatggtctgtggaacatagttgtcccactacccacggaggctgcattacaagactccgtgtggaaggctatggtaaagtgtactttataaattaattaggtgcagtgattgataaacaacaactaataataaaatctaacagtcgcaaaaatacattacaaaaagacatataagtgaaatctttgccaaaatatcttactatatagtgtaatatgtttctaggtatctaaagagtatataatatgggagtcctatatagcttagataagaaatgatgaaaacaggggtagagagatggctcagtggttaagagcactgacttttcttccagaggacttaggttcagtttccagcacccacatggcagctcacattggtctataactccagttccaggagaaacaacagatgtacatataggcaaaacaccattgcacaaaagtaaaaataaaaaaatcatcttaaaaagtgaatttgaggctagcctggtctacagagtgagttccaagacagcttaggctacacacacacacaaagaatgattgaaaaaatgaaactttgacagtgttaagtagattgtgtaagagcattggccttggagtcatgatactcagattctatattcttcccccatgtaccactgggcatagaccttacctgcttattccatctatttgtgtaaaacttacttttcagggtcaggccatatgaagaaataaaaggctgtctaaaaggtcttcttagtgcttcaaacacataaacatattctatctatttctatctattctttctattttcattatcattttgattattgctgtttttgagggaaacattggaagaactttagctcttcattgacaggaatgataaatgggataacggtggaaattaaacagagaggagaataacccattttttaaaaaacgtgtctaattttgaacagaaacaatgcatatgtcactcatttcttttaaaattccctctaattctccacccctagctttggaaactaatttagttctttctgcatgctaagcatgttctctacactgagttatatagttgccaaccagtatattcaagatgttggtagtattccattgccttccacaatgcatggctctccggctaataaacattattctctttgtgaggtctatgggggccagtgtcaacagttagagccttgtgcaagccctttccaggaaagcatggctgattgctcctcaggactcctgcttcagatgtgatggagagggaagctgaggacttaggactgtgcctgcacttctttctgctgacaggcttttctcggctgtactctggaagtcggtggaagcactgtcttgtttgcttcacaggactttgtgggacttaggatagatcagaacagatcctagaatttcctttcatcttcattctaagaaatacagacagatcagacgtggggaccataaaatgcttaggaaatgcagctttcaaagtggctacagagatccttgtttgggtatgaaaactactgaaagttgtttgaagtcttttctgattggttctttcagacagaatgcagctcctagacctaacctttgctgatctttagtgtcctaactaaggcaagttctgaatacattaactccaaggcctctgcttgtggaactaaggttgctggatgattataaacatatcccagcctcttttataaatcattagcactaaggatccaagtacatggttttgcagctatgggtttggcttttgaattgtgctattaaaaagtactgctcttttataaaagtactttttgtcactaggaactaacttatcttttagcttttaagtttatatattggcgatgaacttttcaacaaatatgtcaacagcatatttcagagtaatagattgttatgcttttatgtgattttcttgggtgaatttgaagattagatacagttgccgtgtgtgtaccttctcatacttcttctctttgctgcctctctctagttacttctttttcccttgtcttggcatggaagactgcaaaccagaagtatgccagattatacctgttttggggagcatagcctagacacattccagagacctgggtggcctgtatggaggtagggtttattttttgcctttgggcatccaacacatgggatctagagatgagaagcctacaaatctgctgacaagacaaggtagaagtttccagaaatgaacagaagcaaccatctcttcactcccaagacatagccaagcagctatgatgatccttttgtcaaatcacatggagagagtcatttatcacttccacgtggaaacctgaaattatgtctgttaaagggcatagcatgttccccctttctaagtaggactgaagcatccacactttggtcttccttcttcttgaacttcatgtgatatataagttgtatcatgggcattttgaccttttgggctaatatccacttatcagtgagtacataccatgtatattctcactcagaataatattttctagttcatccatttgcctgcaaatttcatgaagtcgttgtttttaatagttgagtagtactccattgtgtaaatgtaccatattttctttttccattcctctgctgagggacatctgtgttgtttccagcttcttgctattataaataagggtactataaacatagtggggcataaaatgtcctttttatgtttgagccaccagaaattcccagatgccagggacgcaagaagttacaaggacccatcggggttgacattagccaaaatacccaacaaaggggtcatagaacctgtagagacgatatccagcagataggcatggccccggttaagggatgggggtacccacccatctccagaactttaacctagaatgattcctgtctaaagaaaatgcagggggacaaaatggggcagagcctgaaggaaaggccatccagagttagctccaccttggcatccatccaatctgcagacaccaaaccctgacacttttgttcatgccaagaagcacttgctgacaggagcctggtatagctctcccgtaagaggctttgccacagcctggtcaaaacagatgtggatgcttgcagccacccatcagactgagcccagggaccccaaagggagagttagagaaggactgaaggagctgaaggggattgcaaccccataggaagaacaacaatatcaactaaggaccctccagagctcctagggactaagccaccaaccgaagagtacacatggaggacccatggctccagctctatatttagcagagaattatcttacctggcatttaaaataggaagggtaggcccttggtcctatggaggttcaatgtcccagcataggggaatgctgaggcgatgaggggtgagtgtgtaggtgggtgggggaacaccctcatagaggcatggggaaggggtatgggatgggggttttgtagaaggaaaactgggaagggggacaacatttgaaaggtaaataaaataactaaaaaaaggcataacatgatttgagtgcctcaaaggggtgaattatagtatggcaagagtgctgtggtggtagcagtgagatctaaagtatcagttaaattaacttcatattgtctacatatttgcacagaagtagtgaaggcttcacatttgagtaggttggaaatattcttggatgttcataaacccactcagaacttatggtatttgccagaagtaaagttactgagttttagaaagaggaggtgttgcatttaattttggttttgctggtcaaccttcagtatgaatatatacatattttgcttcttctgtaatttcaagttaaaacattaaatgattactacagctggtagatttcaggttgattccgtcctttgtgtttaccttaaaaagtctctccttcctgtaaatttactaacactagaagtatcctgagtgctgtagccacactctaacgatattcctaaccaatgtggtttgatgtttaggctggcctacctgaggttgtgtcactcaagtgtgtgtgtgtatcaatgcaagctttctgtactgtgtacagttttggaaaagtactttgtgatctaacaacagatatgtaaaacattttctgtaaattggggttttgtgttccctgtgttgtgtctcaaaggttgtccctttgttgtgtgaatgtgaccatacataatgggtagacaagtaagcaagacagtatttcagtaaaactttaattacagaagctgtgtggtatgatagttccagatcctttcagtaccatgtcctatccaactcgagtctgccaggctatgaactgacaaacaggttctttgagtacatctgcctcatttctacagcatgcagagccaccatttcttaacactttcatgacatggtgtcatttgatcataaatattgctgttatatcacaccacatcttctgggtggaggggatcggtccttttacatcacctgtgtcatcgtaaaaggatgatacatatttgtaaccattaagaggtttcaaactcttgacagcatacattttagaagaacaagatcttggtgctcatggtgtactacagggatactgaacaggcaggaccattctgtccatgtacagtaggaatcctagattcacctatgcagaccaaggagaaccaaagactgccttattgaaggcttgtggccacatgtctgggatgtctcctgaggggccagatcagttccccactgggtaccatgtgtcaatgggcaagagtagcaagagtctgagctagtgagtcagtggagacttttcaagtccatgttactcatgtctccatcaagccactggaaaaggtgattattcaaaatgctccacgttcgagaggctattgtaaggtctagggtgcctctctctgtcatttcatcagggcagtatcttgccactgctttggttttccttccctccttttccgctcctcccaaacttgagacctcattttatataaggagaggggcttgtattgaatttggccaatggatttcagtacagaagcccatgcatcctattcctggtctgtttactgacagtaggtgcaacattgctacctctggtcttgaaatagtctcaaggccagaccatgttggcacctaaatcagctaggaggacttgtgcacctggaagtttacttctgttgatttctcatctactgtctcctgggcaatcagagcactctgacatcatttggcgaattactccttcagggcactaactgagttgactttgatctctccttttttaatctacaatttttgtatgtaaatttgaaaccttaaaagacaatttcccaggatggcatccaagagatcttatagcctgaggatactaaaactatttcctgggagaaggctgtaactgcagatcaatctccacatgtccttggttattccctggccataggttttatgatcaacccatgctgttgtgaggagacctaaaactcaatgcctctcatgtctaatgaaccccctaatacttggcatgatgacaggcagtgtgaagctgaatactgacaactctacccagctcaaatatttttactatgcatttctatttaaagacatatcaagccagttacatattcataaggttggaagactttttacactaagtgctctgctaggacacacttttcatatctgggttttgtatcgaaggcctctggtatcacagtcaagccttgtgtaagtctgtaataaatcatctttgcagccatgcttgtggatagtccactgcttaccatggctctgcagacccacccctacctactggaattttaattccctcagtaaaattgattccaccaggtctgcacattattctccctgtcttccatttagaccgttagtttcctgacagtagagtacacagcacttagcagctggtttgtggaaccatcagtcaggaaattgtatgataaataggaggtagccaggtttagtggcacttccttctgcttcagcagtttttgcctgactttggagaagtcatcatggagtgttttgtcacgtcctggggcaaaagatggctgtggtgctgtaacagattatacatacattgagttatgatgtgccccaactgcactgctcatgtgtgaaaaataaaccttgaggtggcagatttcgatggctgctggcaacagggacagacctttttgggtctgtgatggaatatgctgctgatgcacagaaacaacaaaccacgatgcaaggtgaggcaggcatttatggactggcatagtcttctaagtgctattgggatcactcccgtgtgatgccacacatgttagaggagtgcttgtcctgggttatattctttatcatttctgggtatgtcaagcattccttgaatcaaaagagggttgtctttgccagttccccccaaaatgtggcttatttccatgaataaccaataaaagctacaattgttcacatgtgctgtttaaatcctgtttaaatttaatcaatagagaaccatatgaatcggaaaagagcaaactaaaaccctttgtcctttagttatataacatgacatctattaattttctgtcctttatttagacccagttccagaattaagaattagtaaatttccttgaccataacacttggtataacagtgctacaagttgtgtttagaatttaactttcaaactcacaaagtgctgtaaacctaacaggtgaggacttcactaaatgccagagtaatgcacttacatctacttatctgatggatgaatgttaatagtacagtcatgcagcaaaatggaaggaagtaaaactcttatcttccaactcagacacagttgtcacagtgtcacttgagacagactcatgtcagaagctcttcagaagtggacttttctttacagttgcttggtttacatacagttctattaaatgtggttcccaagaaagatgacaggcctgaggagaagggtgctgcagagccaagcttgttctggtgtgggaaggaaggaagtcctgcccatatttgatgatcacctgtctttactctagattggagcgtgattaatgtggatgcttttttaaaaattaaatttaaagttcagacacattccgtaagaatttggccaatttttcaactagtctcaaagactgttccatttagttttatattgtcataaggaggatggataagataactttcatcaaaactggttaaatataatagggatattttactttttatataaggaatatttggttttcctatagggttgcttttcatctcatggttactgagttaagtgtaacattgaatttgccacatggctgaataaacttctacctgcaactcaaactcagcaagccattacatgagaattggcttacatcttttgagcaccaattgctaaacttaacatacagtagtttttcatgtgtacttacgaattgtgtgaggtgtgacaagtgactagataatgtcactggatgcatttcctggcgatgccacagtgaccctgtactgttacctctcgccttacctgatagtacaaccaggagcattcactgagtagagagcacagctcactttcacagactcttgtgctattttctaagtttagaacattggggaatactaatgaaaatgcaattttgtgtcgctctttggtgggtcacccatatttagtgagggcgtactcacagttttcccctcatacctttctgttctaagtatgcttagatctttaaaggaaggccacaaggggaaaagttgggggtgggggaggaagtgaagcatagcttaccttctaaaagaagaaagattgaagaaaaattgggaagtagatggatgtagagggaagaaaatgagatgcttctgaattcatcactgtgatcgtcacctaggtccacttacatttatgaactggtgttctcagttacggtgcatcatcgctgcctcaggaggtacagtgcacacacatgcctggtgtgcttgcacagtttcccaaaccagtcactgttctggatgcaggaaacctgcttatcaagcttttgtttgacttgcctttaagcctgctaattataattttcagaatccttaactaactaggtaccattctaaagtttgcttgctgtgcatatcagtccccaagagagctttgctgtgacagctgactgtcagtgctcaatggcactatttaagaattatctgctgacatatttactataatatcacttagcacaggtgacaaatgtacaggtttcaggctcccttattttattccttgaaacttggacaaaacatttggactaaatatcagtcatacttgtagctataaatccattgaagttctgttcacttttatgtagcagatcagtatagttttttaaaaaaatcatttttttagatttgaagaaacaacaggtacaattaagaagactctgtaaaagtagaagacacacacacacacacacacacacacacacacacacaggacccagggactgacagacaggatgggcggaggaacagacaggaactataggttcccatggaagccagacaaagatgttagatccccttagagctggacttacaagtgattttgagccgctggacatggttgttaggaatcaaacttgagtccctctgcaaaagcagcaagggtgcttaatcactgacccatctctttggtctcagctcttgaaattcctaaaagagatttcatactgtaaagttgccttcagttgaaatgccatctcaaagtgttcgctttatataaggtgtactttctttccttttcagaccctcctcatcttttccctgccttccatcctcctgtaccaattgatgccagacatcatgagggccgttaccattatgatccatctcctattcctccattacatgtgtaagtattaaaatgttacccattaatgaaatggacctaagctctggcttttaggcttcaggactctttgttaatgcatgtcttctgggctttggaggtgtgataacagtgtaagatttactcttaagatacagcaaagctctatctgctcctggagtcactgaatcagaccctgtgctttctgaggatgcctgtcatatggtttagctggccactggtttctcagtattttgctgatgagagagagagacaaacagttgtgagttataaacttaaaattaaagcattaaagttaaattttaattgaagcttaccacgtacaatatgtgcttggttgtgattttggtttgaagttctacatgctaaaatttttgttacatgaaaagttctgaccaaggattacactggatcgaaatgaaatgtttatggaagattttcagaattcccatggtccatataccaacagtcacttgattgatgggaatgtcacccaaataagatggcaaatgtgattgaacacatggtttcacataagataaaagaaaaggattggtgataaaatgtatttagtataaaaggaaaaagaaagcctcattgaaataaatattatctcagtttgttttgaagggaaagaaaaagaatcattgatttatacactaacagaatattcttctgctgtaaacttgagaaaactgtcatgtaagaattggatgcactccctggaagggactgttccctgctaatggcctcggtacacatgtagtcatatgtaataatcaccttccttttgagaaggggaagttagaaaaacgcgaataatactttgaagaataatgctggttatatagatgctagattgcatctctctgactattagttacagatgtgtaattacatggtatgccgaagaaaaatgaagttgttttaaaacaagtcctcctctgtgaacagaattaattgatattaacaggcctaactgtatgcccaagtacacatataatattttaccaaccggtctttagatccatctcccattactgaattgtaatttcagttcagatttgcctggaggtgagtaatgaatctgcattgagaacttctgtaggcattggaggagaagtgggtatttacagagggagaagtcagagtgttgtgacttattcctcctgtgacttctactagagcacaagcaagtatttacaggattctgaagcctgataaaactgcactcacctaacaccaaagaccaaaggaagttctactacacagagggaagtgcgttcctaagtgagtttgcaagatgacctgtgactcacctggtcttatagagcctttatggcctggataggaccacagagatcttggtgttctgtcctgtatctagatcacacaagacctcagagacaaagatagctaattcctcccagtctttctgagaaagtaattttaaccagatgttctatggaatcggaaagtttttcactttttcaaaaagcatgttctagagaattttcttaaactgagctcaaataatatgctgaactctttcctctgggcttcttatagttcatcttttaagtaaattcaaataggaagttaccaatgaaaaactgcacctcttggtcctctggcagagttataggaccgtcaaagtctcccgcaatcctgttttgtgtcctaggctgttaggttcatagcaaaagcagtgtcacagatgagctaagccacgtgtggagcagcagagtcggccgtgggttttggcttcagctgtgacattgagctggggttctaagcttcacagcacttcctgccttttcagtcaagttttaagatatttaagcagtgattgactaaattgttcttgtgcagcctacatgtgtaattatcaaagagttatgatgtaaggcaggttgacaattcaagtttcaagagaataagtccttgaaggctctgagagaatgttgtgtctgtgggtgtgaaacacggcaccgaatgtctgcagtttcctgggactgttcacatcataaccgagtagattcctgggtggctctgactgagattatgacattggctctaggaagttagagcagtcacatctccatgcctttgtagcattgtgctttcttcgcattgttttcttctcgcttggtaatttcttaggagctttatttggggaaagtgctcagcatatgagcagatagacatgtagatgctgctcagtggatagctaggctggtccagcctttgaagtattgcctgagttatcaggatgccttaggcttgccacacacttgtactgtaggccctggcaaatgccccctgatgtgggccctgcacttcactaaaatgaagctatttgctttaggaagagctcaataaaataacctcatgtatttactatactgtatttatttgggtctctaaataaatgcttacagttagtgtataatggcaccaaatttcttctagtcttgctccatgatgacgcagctgtctgtaccccttctgtcaggcgtggacacacctgtgattgttaaagctgagagtattgatagtaaatgtggcccctttacccaaacctccccagtattaactgtaaaatataaaagtatcctatccagactttgaattccaagatgtttgctgtataattgcctcctagaaaatgaaatcaagtgagcttactaagcttttagagtgaatattttaattacaggaagataaaacttggcgatattctcattattttgtaaacacaattgttcttctggtgccaactttagaaactaaattataagtctctgaaaaacaagggcctgtgttgatggaaatgctgacagaccagtgttcagaaggatagcaggcactgcggtaattatgctatcatattccatcattagagattctattgaaaaggtttataaattgctcctctttttagataaaccaccctatattaaggcatcaatgatacggtgcagaattaaattaaaatctcataaaatgaaatatgttctgtattagctgtttgacacttaatttgcctctgaatgagtagaggaaatcacaaattaacctgcttttgtttttccaaccgtggcttattaggtgttagaacaactgcaattatagcccaataataacccaggagccttataaatatgtacggaaatatgtaagcctgtgtttaaaaactaggtttgttacatgaaatgcctttagttacactccttgcttgcacactgttgtccacagtttatggttgagcaaagcagctcgaggatagacatttaaatgaactaaaatacagtactagaaataatcctaggatttattgaaatttcttttagcccaaaatcatgaaattaattttaaaaggtcataagtgggtcatgccataggtgccatgtctctaggttgtcacatcaaactgctctctgaaatggacaatgactgcatcatgtttatgtcattcaaatagtttcttgaacattgaatatgagaattctttcctcatcttatgagttgttcagaatgcatgtgtccaactgatacctggaatgtctctttctcaggttgtaataatccccaattctatgtaaagttaaacacagtgttttagaaaaatcaccaaagtccacttagcatattgctgagcccatctggtgcctctgtgatatccctgagcccggacacacactgcagaagagaacgggaaacgtgtccagtcctctctttgttccctggcttgagctgtttacaccagggctctataaccctgtggtcacactgttctatgctgtgggccttgataaagccctctagactacatgttactactgggttttaaaacttctttaaaaatggagacagttgttcagttatatcttactatactcagattttcaagtgattttttttttttacagccacaaagaatgtgctactgcattttgagtttgtgaacattttgagtttgtgtgtacatttgagtgtgtgcattttgagtgtttgtgagttttgagtgtgtgtatgttttaagtgctggaagttacttgatcatgtttcatttcaaaagtaggcatgatgtatttttagaaactcaaattataaagacttttgaattctagtatgatttcattcacattcttgtggggtttccagggtgtgttgatatctattctgtatgtaaaaactctttgagccaagtttttctcattcatgaaccagtatgaattagattttggactttcctgtagctttctactgaggtctacaaattcattttccaaagctgagtccttagttactaatccattgcaataattcaggccccagtgatctgatcttcttgctgtgaaactgagagcagtgttggcattgtgcagtggatgcgaatggtacgtcactaagctgcatctttagacagtatgcagaacctgctctgcatcccctccactttactaatgccttttagaaaaactgctttatctttacggtccagtgagaagtgagcactctcctagttctttcccttgagtcaaggtggcttacagggaagctgcccgattcagtgcagtggctatcaggaaggggatctagccttcacaaaaactagcctgcctccagctgctcagagaggagtgagggtacgagccttaccatcagctttgagccagattacactgggacaaggaagttttgcccttgtgattacatagccttttaggcttgagagcagaaggtgagcagaaagtgtgggaaatgcttgcattcactacttcccagagagagacagagtgtgaggaaaggtgctactccattatggtaaatatctagggaaagcaacagtaggtaaatgatcagggctgctactcagtctccctgcgccactgaactcagtgtctttttagtgctaactgtgtttattgtccgtgcacgtaatgtttattcacaagaagttttcagcctggcctcttaaaatgggtgcatatgcaaactagtggtttcattttatttattctgagggactccttgactgagatatggagaattagcaaaatcttatatttggggcataactggtttagaatattttaatcacataatttaaaatgaagaaagaacagcaatttttttttatatcatccagtatttggatctaccatggatgactctgagactggtaaagtgtactaacatcagattacattgagtactgtagcaacacaaataccattatcttcatacagaaaaaaaataaaacaaactagattgtaatttgcttctctcaaggcaactgctgtgtttctttgcttctgtgagactgagtctctgttgcaaaccctgtagctcgtaagtaattggttatttagtgatgagaactggctcctgctgcttaggctgctgcgtcactttcccttttttcttttccttttcatttgcttcattttgttagaatatgtttcctcgtgctaacaaagcttgcacactcaggagtgaaagatcccaaatgcgtgattgctaagtttctattaagagttcctattgcaatggtgaatgcttcccatagacaacttgattccttgatagaaaaacagctactatagtcttcttgcaattgggatacacacacacacattactagtttatgtataactagtatatattaaatatgcacacatattgcatctatccatctatctatatacattctacagcagtgtacactgatgcccaagttttctagctataaaaaaaccctttttaactcaaaaacctgaacatgtatatgaattttataataattctccagatcatcatgtgttcatcttagcatcttccagaagtattagcacctattccttctcatgtgtggtgatatatctatgtatttgcatatatattgcaattgcgtacaaatagtacgaataccagaattccatggataaggtacaaaagaaacattgatgttggaaaggatacataataatgaccgaaactaatgctgatgacttactgtaggttaagcacattttaagactccataattatctactgtgatattttcccaagcctatgatggaggttttatcattagctccattgtaagcttatagacatttaaacataagaacacatacagcctttggagtgagttacacctgtattttagtttagggattggggtccacattcttgcccatttgctttgctctattagtaaagatgaataccacacactttgcaggcctgggttttatttagccaattctatcaacacctggctcctgcaacatgctaagatgaatacatgacactctggagaagtgttatagaagtcatatacatattcaggcttttgagttacaatttagacctcagtgtgcactgccatagaatgtgtgaagcttctgggacagtttgcctatccagccacaggtatggcatacctagttgcatttgataagactgcagtgaaacatgcataaataaccagcacttattctgaatgtccaatagaattcaagccccgttaactcctttccagtgtttcgtttattttcctggagactttttctttagatattcatgcttgcttcctcgcttaatgtcttcccgtttggatgtcttcttaccggacttctgctaggaacagccacctgagatagtgtgtggcacctgagccaagcctggtccacctgctgtgcttctaagtgcacttttattggagtacagtgacattcaccgctgttgctacagcaacttttaacagtaagggcacaggggagtaacatcaacattgaaagtacgtggggaccccaggctaccagtgccagcctcggagagatcacagccctctccagcgtcactctggtctctgctgtgaggatctttcagctgttttcacactgttaccgagaggtttccttgtatgtgtcatctcagttcaacaaaaggtctaaacgtttggttgtagtttttcacaataagcagaaaagattaacccgccaggatttgtttatcacccaccttcgttgtcagccccgtttggcgtgcatatatgattgaggtcatctcctaaacttttaaaattgtaatgggtaggcagcctacattctgatcagccagcacacatttctctttacattaagaaaagaacacaaaacaggttgtattcagaaggtgtaatacttctcagctttgtagtatttctaatgactgaaatattgaatctgttcttcggttgcagagaaagcagaccctaattacagcgtacattcacggagcccaagcggcagcttcttggaaaagaattcctgtgttttttgtgctgtgctcagcaacacactccggagcagatattgactgcagcattcacagtcactgagctggaagctgccgactctatagaggctgctgtcaaacctgttgtgggggcctaggaggtagtggactgtaaccgacttttttctttgaatacaatgcttccactcatgctaagcctggcttcaaagaaaacagaaatttacttcattcattttatttatttttcaaaatacgagtttaaaaaatcgaactctaacaaaatttatccccacaggaagctgcttgggagctttacatcacaaatattgccctacctagacccaagggcagcacttcctatgtggccatccttctcttaggtataagagctcacttagcaataacctaaaacaggtggtttcttctcgccacccagcaagctcatgtaagttctttccccagcaagacaaggccccagaacacacagctgcctgccattccttcttgttactgctctagccctatacctgccctcagggaaatccatttaccaggaaaattaaatgttagcagatatgtttctaggaatggcttgtgaactctttgaatacaaaatgccgaattagttggctcttcgcctcttggatgatctgtaccactgccaagaatgagcaggagaaaatggttagcgagataccgccttttcacacatttttacagccaggtaaccatgctgggaaatttttgaaatgtaatctttgccacttttgttctgatgggatctgttcaaaaggcatctcagaacaggcacgggcccttacgtcgtgctttggttgcttagacttagctggaacagtaacactgaaccaactttgacaagtctgaagctggagcaacacggacaagcaacaacaaactctgaagtgggaaaaacttcactttgtacttttttaaaaggactttttttgtacagtgcgtttggatcatattctctttgcttgtctaactcttcctagattcacccccgttcagctttgtttcccctcctccccaagactagtttgtgctgcttgggatgttcggttgatttaccaggagctacactcttacagaaaactgcatccctgtcttcccccagctaagagttactggcagctccacattgagaggcggattatgtgcccaactcttccctccatgctgggatttagcctgctttgggcttgcacaaggtttggtctgctgttgcaaatgctccgacttcatgagtgcggctgccctgctctgtccaggagaagctgttaccttgtagtcgtccactgcctctgcgtacactctttccatccctgtttctacagtgaccctggaaccttggagggagcagtggatcaggggagggcaggtacattttctttagtgctgagccttctgaagtcctactctctaccaaatggccagctgtgggtctctatgtaaacaaccatttactacaaaacgaagcctctcagatgagggttgcttctgtttagcagaataatagtagttaggctttccctgaaggtctgcgacttgtctggccataggttctcagcttgctaatgggacctgggatgggtttcaccttatggagtggaatttaaatctaatcagaaacttccgtgatgtatgtgtcagtgttgcaccagagagcttggtttgtcaggccagtcttttctcctccagtcgtttgtattttacctgcagcactatgaaagctaaccagtatctgagccatctctgtggcttgagtcctctgtccctttcgtttctataacatgaagttcccacttggggctgttatggggacacaagcttcagtctaaagagctgagcaaacactggaattattgcacttctctaggaaaaaaggaaaggaaaggaaaggaaaggaaaggaaaggaaaggaaaggaggacaaaaagaaacaaagactgaaagaaaaacacctagctataacaaaataaacaaacaaaaaacatattaaaaaaataaaacaaaaacctgaagagtattttgtgttggtcaactactcctgagcatgaggctaaagccattctcactccactggacaaaactgctgttccttctcccagtaggtatcaattgccaatggctacttaggggtgggactttgtgcccacttctccctgctggggttttgtctggctaagcttcttgctattggtgggtattaacatggagacctctagctggacaatgcggaggctttggagcattgagtcctaaatggaatgtctttatcacacccgtccccccagtacttatagctcagagatgtatgtggaagaagagacaaaagatagtaagagccagaggtgtggataattccaaggaagcagtgttttccagacacagcaggagtgatgtacatacagactcccagcaagtgtgataacatgcattttcacagggccctctgtgaaggcccttccctgctaacatctgcaaattctttctgtggtgcctgggaagctggtttgagccacttaaggtagccagggcttagcttacaggcgtaatgtcatgtgggtccatgcatgttttacttcctgggaataagttagacgctaaagaagagttatatatttattgaaatgcattctgatattatctaaatcctgccaaatgcatgtgatatgcatgtatgtcctatcatatgggccagggtggagggacatgattcctccccacttacaagagaaatcatggagacttgttactccagtttaccttacacacacacacacacacacacacacacacacacacacagagagagagagagagagagagagagagagagagacagtatgcccattcctgctcacttttttataataattattacttaagacttgtcagtgaaagcctgcataatcatctattttaatgaaggtagtcagaacgagtaaagccagcttgtttaaatggccaaactctgggcttctctgattctgggctttagctgtgcagcacctcatgcaaccgttgcatacagggaaggttccccaattcaagattccctgggaagagatggaatttggtactaaagcagggacagcctgctgcacgaagcttctctgtgccttggtgtatgacattcacccatgcaaatgtggcacagctgtgagttttgtacactctttgtaagagtccttgagcatttcaggagtagctcctcagtcatgaaaggcaggcatcgggctgtagggctttaacctgcctggtccttccagtgctcccttttgtggcttattttcgtgatgtgaagcaaatgtacattgcatcacaatgaactgggcctgaattctccacctttccaacttttagcctggggatagacttgggttgtgccggtcactgtttgctgcttctgtttgtagggaggagagatttaccttggaagacatggaacttgaatgggaaggaaaagcagagtgcattccctcccccagtgtggagagggaggaaagcctccttctttggtctatttgcttagcaatggtcttctttgatgcagtcttttcgtgggcacccactgaagtctcagtgtactcaagttttagaaaaggcagttggccagtctttgttttctttgttgaactgtttattttgctttcttcctacaaggttgcctggccctgctctcacagcgcttttctgcatgaattacattcctcagagccacaagtctcccagttcttccaggcaatttgactctggcctgtgtgttcagtctatagcttccatctgcctgaagtctttgccaagaatacttgctgaatgactaacgtggggacctaaagacatgttttaaatgtcattagcgagaagagctgaggttcattcaagtttgtaacttggctattctgtagtcgttattagctttaagatcagtgaaggaagagctactaagccctttgctttcctttgaatgtggagaaggcaactgaaggctgatagtgcaggtttgccctcctcgggtctagttagtaaatgtcagctgtcctgtggggaggggccatgtctactccatgtaagtgaaagccacatttctgagctatctcataatttttatttttgaattttagacatttatacttgtaaatcttgccatagtgggcaaaagtgcgttaccttctctgtggaaataataaacatagaaagtatgcagatgctgtttccttctcttctgcgtatcattttttcctaaagcatagcttatagctggaacagagaagagtaactcctgaattcaaaattatgttttaaacttccattactaataacagataattgatcttataatgtgttgaacttcactgcaggtgttaatgggatagttatacagttttcaaaattcagctaccttgagaacaaatttctgggagtgaagaatggggatagatatacattatatgtattaatatatgtatgttatatatgtgattaatatatacatatgattaaggtacattatatagatctaagagtttcaaaggataaaataattttaaaattttagtaaggaattagggagggaaaaatgtataccaagtgatgataaatgaatattcagagtggaagagtgttttctgcatctgtgcagtgaagtatgatggattgcttgattaaaatttttattggcaaaatttttaaaaaagcaaaattccagacaattctgctttaaaattacacttgtctgtctgtctgtctgttctgggtgtatacatgtagaccattttatacatgtgtacatcaaaagacaacatggaatagggactcatgagactcaggttgtcaggcttggcagtaggcaccttcactatctaagcctcctcagtatgctcacctgcttggtttgttgtttgtttgtttgtttgtttgtatgttttagcctgtgttttttgtttgcttagttacgtcagttatcttagtcagctattgttacttatatgtacatgacaatcttgattttactcaagaattttataatgccaaaccagaactctgtatttatcattaatagacctagagatctttttctgttggaatttccaagaaggtagacccagattttgtcaagaaaggcagcacatgggtggaaacagtacaaatctattcatccccagggctttctggaagtcttgagtgatgtcccagaggctgttgtttctctctctctctctctctctctctctctctctctctctctctctctctctctctgtcaataacannnnnnnnnnnnnnnnnnnntcacattatctgtcctaatcatctctagttttaaagtccagagccagaatcaggaaggggattcctttttgtaaccaaatataaccaagtacagcgatagaatagggagtgttcgccccagaagggagcacactctaggtcatctctcatgtcacaatcccaagttcagcatggtcatcccagtgaaatggtgacatctcttagaactaaattgtgtgtgttttgtcactgttgctgccgcccaagcctgattggaagtaggcttcttctagctgagcattagtttccacaatggttgagtgttctcagggcacagacttctgtctgcctccctgtcaccattccgtttgacagtaaaagatccatgatttgttcagtagttttggccaacagacttacttcctgcttcttgtgacctctgatattagtagcttggtaattcctcctgtgtgtcttaggatcttgggcttgggcctccgtggtgaagaattcattgcctctcagaacaggctctcttttcctaacattttgtttgctacatgatctatggtaatgtttcgttcctgggtttcagcatataactccagaaggttcaaacattagctcatacattctgattatcttcatttatcatggtgtcactgggtatccctggctgatctggaactcaactgtgaggaccagtctgccctctgagtactgggattgaaggtgcttgccaccatgccaggcctgacttgtattttcacggtccctgggcctgagctgggttccattctgtgttaagtggctccttgagtgttttcccccacctttgtttccagatgcaaattggaatggagaatgggctgttaggggaagatctatgtttgttcattgacttttgttgttttgtttgtttgtttgttttgttttttccttttatacagacacacttaaagtgattctgaagagattctctaccccatgcatgctcacatgaccttctgttttatcccataagccataggtttcctgcagattagttaatctctccactctgctctcactatttcatctttttttttttaatctaagatccaatgatgggcacacatagagcacctaatgtctcacaaaccacagagatttggcaagtggtagactgcccgatacatgtccaatcatgaacttaactcatgtttgcagctctgcatctttctcctgaccctggaactttggaattggggcatattttataaactgtagtggtttctgtttttattggtgaagtggcacgcaggaggaagtttcacgtgtctcttaatatgactgtcttgttttcatttccatttttgttcatggactatagtgaccaaaagcttttaaaagaaagactatatttgagaaaggcttttagagttcttttaaaattaaagcaaaacctggaagtgagacaaaaatatttctcaaaatcctgaatctttaaagtaatgtcattttagagttgaaaactcatccttgtttgtttttaggaaaaaataataataaatgttttcttccccactaaaatcccagctactgtttcctaaattacacagtaatgatcctacttggaaaattgcaaagttaaagtatagagagaatgtttcagaatgcttctgctgcctacatcttagaaaatgaaaaacgaggggtccctcagcctggcaggggataaagaggaaggcatgtacagcgagctgactgtgcggtgtgtttgtgaagatgcatagcaccagctctgagagggtaaggcttcatgattaatggtgtttattcttgacagaagcctcctttatttatctgcaatacagtttagcgattttatcaggcacctgaatgaaaaatattcagtcataccaatattgcagtgtaaattgagtagagtcactttttattatatctttttgccttatcatccacacagtaattttctagcagaggtatgatatggaaaggctggatttagtcgtacttgacacaaagcctcttcaatttcccctaaaagttcaggcttagaagtgtgtgtgtgtgtgtgtgtgtgtgtgtgtgtgtgtatcttatatataaacccttctctcttattgaagcagtttcaggatttgaaagaataaagataaactgtacaaacctgggtagggaaaactgttaatataaaaatatgtaatagctgtaaactggctgacgcgccgctgctgggtgagctcctggactccacactgaagctttgtttggctcctggtcccactcttctaatcagccaccatcaggcctcatcagcataaggctttactctatcatctctttgggaaatgacatcaaagcagagcatgccgctgccctagagaggacattagtagctgcaaagatggcagtgctgtcacagggatgaagaaaggaaatggagaacccattttctgactaacgatggagccttgctcttctggctcagaagtccacctaaacctgactccagtgtgaatgtgtgaaagtaggcgcaacatgaggtcaggattaacttcttgaactctagaattgtgcttttaattattgatctgtacccaaagtgacttctcacacaaaacaaatccaaggttattgcttctcggatttttaaaaatatctatttgtctaaattgtttaatcatccagataaatgtacaaccatggaatgagttattttttaatgccttttaaaacattctttgtatattttttattattttcttttatatccctcaagtcctcctagatctgtcccccttcttacccacacaactctattccctctcttaaaacaaacaaaaaaacaaaagaaaaagccagtaaaaagcaccgagttctagttctgtttctgttggccaactgcttctgagcacagtggagtgtggttgataatgcccagtgttactcctttgaagacaaccaattttccctgcctcgccctttcccagcctcgcttcctataagctatttgtaaatgttttcttggctggggtgggagtttgcacccagtccctttcgtttatgccgagatttctgtctggtttgagcttttgcatgttttgtacatgctgccatggtctctgttggtccatatgtgctccagtgttcttctacccagaaaagtaaatgtgtacttggagtcattcctcttacagttagtagatagcatgactcaaactcagactttctacaaaatatgaaggtaggcttctttattgttatgaggatatggcacctaaacaagtatcagaaatttcagttatagttagcgctgagatggtacttggcaatttgctgggtgactacatgtttcaaaatcaaaatatatatttttttgatgtatattttctttcggacccaggatattacttgccgtttttatattttaaatataattgcctattgaatatatttgtattgaatatattttgaccatattaccaactccttgtgtacccacttctctctgttctcacatttctgctccatgctcgcctactttgtccctctaaaccagtggttctcaaccttcctactgttgtggccctatggccctttaatatagttcctcatattgtggtgacctcagccataaaataatttcattgctacttcataactgtaattttgcattatcatgaattgtaatgtaaatatctgagttttttgatggtctcaagcaacccctgtgaaagggtcatttgacctttaaagggatcagacccactagtgggaaacagctactttaaacaatctctctctctctctctctctctctctctctctctctctctctctcgtgtgtgtttgtgtgtgtgtgtgtgtgtgtgtgtgtgtgtgtgtgtgtgtgtgtgtgagtgagtgtgtgtgtgagcatgtgatactgttactattagaggaaaaaagcaggagaagcagtctaagaagtacgcatagacaggatgttctgaacggaacctttgttcctcaagacatttttctaatttgttggcaatgtcttaagtctttacaataaaatgcctcttgttttttatgcccctgattcttagattgagattttttttcatgatgttctattcatcttgaagttagtactcatacttggttactaatttattaatttatcttttctttgtttgagtgttacagttttctaacttgttttctgtcttcagtattctgtccttcagtcaattccttggtcaaggcttttatattttaggtaatgtgtttttccatttaaaattttcaaattattttcttttcagtatttatacctctttagagttcatcttttatatcttatattgtctttcttactttcccagctgtttgtggtctattgggattcattcagaaatttgtattttctttgatttctctgaacactcctgtaatgacccttctgagctctccaggacagaatgtagttcacctgtagttcatgctttgggataagtagttttgaggagcagagctgctcagtttcttgtttacgcatgtatatgcattaaaggttgtacataatgaagttagataatgagttggatgtatttattctttaaaaaatgtattcatttgcttatttattttaaatcactctgattgtttccaaggggatgcttgctctgttcagtagggaccacagggttgtagagttggggtgcaaattagaatattgtttgcaaagacaatcactatcaacatcaagccagcaatgatggaacaataagatttaaatgaaaaattaatcctaccagaaccaataatttaggggcaaaggataactaaaatactgaatgcgctaatacattatttattgtgcatatgtatggaaatgaaagggggagcagtcccaacaacacaacaaagaaacctagggttagactgaggtagttcttgtctaaagcaaagagtagagtagaaaatacctggaagaggaaacggttgccgagaagtagagggtataaggaagtcttagctggagaatgactgagtagagagaagtaaagacagagaactaaatgaagaatgccctccccagttcttaaggaggctacacattcctcagtaactaacctgccctttccagtgttgagataatggaatagggaagagcagggacacatggtggagtagggtgttgcttgagtctgagtgactggcttcctctgttgcctgactcctgctctatagttctgctctggcatctgtacctttctttgggacatccggtggcagctgatattctaaacaccttgtagtataacagaagtcacatgagcacaggaccagcactaacaactggagaccaatggtgtgacttggcaacctaaaccccacctgtgaagtactgtctactgagctggctggggtctttttgaaacagtatccttccgttgttccaagctgagtctacttcttctaatgaccatatgttcatccctgtttcaagccactcagtctactgtgccacgacgccttattgcaggactaatgatctactctatgccccgtgcttcatgacacaggggccaggtgactgtgctgctcactcagcaggggtcctttccagatgagacccacagctgttttgtgaatgaaagcacagcatatccaccccttgctgaattttccttttcctctactctttatgatatcacatctatggctactatacagatgtctttagtctgccagtcatgagctttgtctcctagagttcgctgggtggaggtcctttctctgtgtcccctctaagctggctctagactttctctcctgctatagaagttctgttttttattcctcttaagcataaacattcatgtgccatctgacttctttcaccattattgtctacattttttttttttttttggagaatctggaagactatacttaggggttgttaactgtcttcctctcttattttgcccatttgagtactattttcaatgtggatttggaaattcatcaaattccagaaaataggttctgtagaatgagtgggtaagtttttaggaaaattacttaaacttcttgcttatttgaaaagaaaaacaattctaggactggagtgatgattcagtggctaagaacactggctgatcttttagagaactctagttcaattccaaacatacacctgtcactccacccccaggaaatctgatactgggcactgaatgcaataggcacaggcttggtgcacagacatccatgttgacaaaatacctatacacataaaatagaataaaataataaaatattttcttaaaatgccttcctttaaaaatgaaaaggaagctattggattaaaatgagaagataactgactacttgaagaaatgaacattcagttttactaagctcggatccatgtgctaagaggtaccatgtgggtgctcctagaggatgtctagggtgtccagtagctgggcttactggcttcagaagagctgatatcccgtgaggccaagaagaaaactatcataagcagactgtggcagtgaggagactgcctttccccaggtaacccctcagtagtaatagcagcagcaggcatgaggttgtggggaccaatatttacaaagtgcttaccattcgacaggtaccagggtaattgctttctgttttcactagctatctctacatatgtgccttctgtttctgagattcaaagatattaagtagatatattcttatgtaaccagaaaatatgtcttaagtaacatcaaagtatatccttaaaattgttgtttgtaatctcttactatgcatgccacagtctcttggtttcaggcttccattggggttcttggaaagaaatgtctttatttatataaaaggcataatgtattaaaatatctttggagttttttcttttgcttgtttgttatgttttgaggcagggtctcgatacatagccctggctgtcctggaacttaccacttttaatatgttttagtgtctttttttgttgttgctgcgatgataaatcctgaaacagttgttttgactcacagttcaagagtactcatgggcaggtactcaattaagcacttggctatttagcatctgggggtagggagtatccttatattttcttctttctttattattttttgtgtgcacctttggaggtgagagaacaaatgatatcattcaaagtagatgggtcttccctcctgagtcagtacaattaagacagttccttacaggtttgctcctaggtgattttatatccttgtctgtctagttgacaacactaaccatcaagttactgctagttacacagtactttcttaagagaaaaaaagaaaagatgtctttttattgcacattgcagaatggaatgtttgtaaaggtattacatttatttgtttgacagctagactttctaaagttataattttgaatataatatgcatccatgttaaaatcaaaactctttgtttagatgccattttgtcatgcaagtgaggtcttttggctcacccactagcttctcccctttcctacccttgtttctaaagtgttagagggcaggcaagacagctaaggcagtaaaggtgcatgccaccaagccagatagcctcagttcagctccagtccttggaacctgtgtgttgggaggagagaacccactcctctaagttgtcctctgacctccaagtgtcatgatgcatgtttgcatggacatatgtgtgctcacacaaaatgattaaaatacataattaaacatgaaattaaatctagtgtcagattcatgtagctatttttcttcttttgtaaaatttattaaatgggtaagaagaaccatgaaaacaccatttcacaaataggagaccattatttcccaaagacttacctgaatgagtagtgtgttcattaaaagcctttaaaaacaaaaccaaacactgtacattgtaatcaattagacagaattttatttaatttttcatccttgggagtttaatctcttaatagaaataattgtagtaacattttatcaaatttatcttagttttcatctctgggcagaataaaatccgttttagctgcaaccagtcctactggttctagaatgtggtacataggtggaaggaaatgtatccatgaatgtgatgtttcttttcttctccattgacaagaaacttctgatttgctttagcaaaagctttctttgctcccaaaactcatatgcacagtctgtcttctgttgtctacttggcacttacaccactgacttaacaagtctaattttgtccaataatagcaaatgttatattatttgtactacttttaaggtcaccaaaatttttataaattttaaaaagtattatatatatgtagtttgttctaaatttaattgatagcaactactatgagaaacttcagtgtgtgtagcactaagaaaacagtgtaccttctgaagaagtgatatgaacagtattgcagaagagtgcacacagtgtatgcatacagctcagtgaacggtagtgagtctccataaataaaggcatctgccagttgagcaagactagaaatagaacattgtagcacacctgttgcctatgctataccatgaaccaaggatgagtattctgatatcctcatgtttataacattgggtttaagtgttactaaactttgtataagttactatactacctacagtaatcttttagctggatattctgtccagtatccctcattgtagttcattcattttcataactttgctattgtatgaattatttttgttcactatcctatcattgggtagctgtttctaattttatagagggtaaagaatgcttctgtgatcttctagtccagatgtcacatgtgcattcaataatggatgtcactggatggtaaaatatgaatctattcaaatagcccaatccatagctgtgctttcacaaggagggtccagcctgcacttatggtggctcagcagtctcattgctacacatctttgccttaaccattgcttattgtttttatcatgggtggcatgagtaattgcaaccccataaaatggatgaacctatgatacccattttggttagagaagtatatctaattctaactaagaagtccagtcattcttgcaatgagtttttgttggttttgttccttaatggtagcatatcatagcacactattaaaatgctataataatcgtctattctattttttttttgtaatctagtttcttgaccttataaaattagtcttaaattatagtcacaaacaaaaacaattttatattgtttgattgcctttggggagatcattaaaacagtctttcgttgtctaaggctgtgcttgctgcacatttctcagattcccgtgggcatcgagaaacaaagcagcatcgactctttatacctcaacagacaactgtaaaatcttcagaggaggcttccctacatgggtactaattggggatgctggggacctgaattcacccaagatgcagagaaacagcccatcctttcatgccagcgggagctccgtccgcatttactacagttttattgataggaccattgccatattactggaattctgtgctacagcatacgtggcatggtttatgtctggttttaggccagtttgaaatatcattgtttttctgcatatgtgttgcttgttctttctaatatcagcaattgcgaacacacagttccagaatatggaggcagagaaggactagtaaccgtcacttccagccttacgtggatctactgagagtggatctactgagagtggatctactgagagtggatctactgagagtgtaaaccaacagagacaagccttttttctttccttcttattgctacttcaattgaatactttttaaaacaagtttaacaaatatttaccaagtcaagttcatgaaatacatccatttatatgtgttttgtggctgcctctatatttccttatacacaattcatccctcctgtggtcactattttgattagtccctttaaacagcaatgtctgctaagtctaaagagtttaaccctctttcacagatgtgtgttcctttacgaatgtaatgatggacgaatgaactagctaccaaggctttggaaacagcactgttaggcgaaggcagaagtgaccttactgaaagactgattcatatacagttagctggctgtttgagccattttcatgcaagtttctgcttttgtcaacactatggaagtgtcatctaatctagcttactagggtgtcttagtcagtgttcagttactgtaaagagacaccatgaccacagcaacctctaaaaggcagcatttaattgaagctggcttatagtttcagaggtttagtccattaccatggcaagaagcatagtgatagagaggcagacatgttgctagagatatacctgagacttctctatctggatccacagtcagcaggaagagatacttgggcaggcttgggcccttaaaacctcaaagcctacctccaatgacacacttcctccaactaggccacatctcccagcccttcccagttactgctgttccttgatgaccaagcatttaaatatatgagcctatgggggtgggcgtcatatatccttattcaaactatcatgggttctgatgcagaagctcagctttaacagagtacacagggtgatggagcagtatggaaagtggacttgcagccactgctgtacttggaagctagcttgtcatttggacattattggatcgagaaaaggttttgttggccagtttcaaaatttcttgacattgggtttgcatgtgtgccttctaatgctcacagcagcaggaagggaactgctggtgtcacgatgcacctacctcatggatcaggagactgatgtatgagtaggagtgagttgtaacccacatccaggtcctttcttcaaaggccctgcatttcattagtgagctcataatcttagccaccctatgtggttctctgacttgactttaaaggagctctaaaaaaaaatccaagtagattgttcagagaagagtacaaaacagactcatattccagttgatactgtgaagactataactagatacttacagcagctgtaattataatcgccaaagtttgcagttaccaagatacgttcagtagtggtatggattcgtaaactgtggctcatcttattaatggggtattacatgatgctgaaaagaaatgagtttttaaagacaagcaggactttgccatttccaagaagacagatgggatgtaaaattgtactcaagattcagaaaggcaaacattatatatttttctatcatatgtaatctagatttttttaaactatgaaaatgcaactatttgcgatggtgtacctgaggaggaaggataaaagaggatgatggcaaatgggtattaccaaagttcatttacttacatgtgtaaaaacgtcacaatgaaatccattactgcagtgaacatacactgtagggaaggaggaaggttttcatcaatgagcagacatttaaggaaacaactaagcgaagggctgtgcccttagagaatattgaaaatggcaagagtctgcctatgtgcggttcagcaatatcagaaatctatactgcagcttaattttgaaagctagtctcccttcccctctccctctccaacccagaggtcagcctgactctgcttcaggaatgctttaattaaataattaaaggtgtgcatcactatacctgtcaaaacaaaggctccaggcatttcaagatttgaaattatatagcatttcatatttgtcaatcctgatgtatgggcctgtttatgtaatatgatatgattttacatgtgcaaatgcatagattcccgtgtgtattttgagtgagcctttgtatggcacaatcatgggacttctgttcaccaccgcccctcattcccacagacagcaaagcacaaagagggtacagaggtgcccaggttacacagctgccagctactgagctgccggcctcagactgtcccttactgactgtctggtgcctgtctccaggattcctggtgagccatcactgtgtcaccattgtgaaacactttcttgcagaagtgggtggcttgcatttaccagatggcctgtttcccgagggcagttaatgagcagggtgcctgttgtgcacacctctctgaagcttctcccagtcaccttgtttgtaaacactgatcccctatctctgagtgcatctgtctgaaaggttaaagtgtagcagctttagctctaagtcttgcattactctcctttctgctgatacttctcactcttctgtatatagccctgagtctagcactctcctcaggaatggagtggtgagatctagaatccttctgagaggcgtccctagttgttctctgggtcttcctgaggtgaaagctcggaaggaagctctagaccacctgtcacatcctcaaggtgcagggaagagaccaaccttggagatcccacctccttgccttactctgggattagtggccaccccagccatttctccatggtccccacatatttatgaatgtaggtttgtcttcatgggcatgattcttataggtggaatttgggctgatgaggacagaatataagaaccagaataagttttcatctttctcaaaattacaaacagagcaacctgctaagaagggtgaaattctccactagtgtgtagttcatatcgtttagcagtgtgtagtctgctgggaccaccatggtgtatcccagaggtgtcttgtcaaggactcagtgaagtgattactgtgtgtgtgcgcgcttgtatctcagcataaggtttatgttttatagattactttttaatcaaactggtagaaggattgaccattctgtcgggtagaaatgaatgtgagcttgccctgtactctgtaagtgacctaacatgtctgaatggagtttgatttaacaagccatagaagggtacttggagggtagggggtggttttccagagacatgaagtgaactcctgtggtacagcttctgccagtttctgtttactttgttagatggaataaaggccttttaacttttcaaaatgacacatagtgtgcatagcatccagtaactgtccatgtgttacattcaagtattatataagtgcattgctgcacttttctagatgctaagaactgtgcgatagacacttcttactatttgtgtataaatttaggaaactgaaattttagtgtatttctccagaaggaactccaagtatcaaaattacatgagaaaatcctcacacagccagcaccttgtttcggaacactgggtctttgcttcatatgccctgcccagtctacttgctggagccatttccattatgatcctactctgacaggatgacagagccaggggcccagtggcagtgtctttgcttccctgggaagagggaaatggtgtttttcactctttggtttccctcctaaccatgtgctctcagtggctctgcctctctcagtctgttctccacatgcctgctcactatcacaggcagtgagtacagagtttaacctgtcatagccagttccctgtatcatttcctggaggcatctattagggaaggagcgcactggtgcaaggctttgcagatctgtgttctagacatgactgtccctgggttgccaatggttggctgaatgtgtggtgaggttgaagttttagacatgtctctctgagatcagatacatcagagagctctgtaggtttgcacttcaggaaagcaagcctcttccattatcacatcactaccggggcctgggtttgatgaaaccctgattctttaccagatgactaagcccaggttttctcagttgttggcttcttactaaacataattaataaggatccatgggaaaaatgagttgtagcagaaacccagttctgaatattgcctcatggaaaagagaagttgcttttaaacactggaaattggttatctttacctgcaagcccactggaagcaggtacacaggtatagaaacagacttcacattgcttacagtttgcctttggtcttcactcttatgggcagctttgccatctagaggctcaagctagacacattctgttttgtttaataatgaagcactacaaagtaagaagtcagtcttaaatgctcccattaatatttggttcagttgttcagttagctgttaagattttctgcaagctaatggctgacttagtatgtgtgtgttacattagggatcaaacccagggccctgtgcatgataagcagatgtgcgatcactgagctaaaacctcatccagttttgagacaatctcttagggtggccttgaattaataactataccataggtctcaaagtcatgacccgtatgccttagactcctggtttctggtattacagttaccatacctgatcaaggctggctttttgtctgcttgtttgtttgttttaacctatcttcagagtactgtgaagtagctcaggactctgttttctttgctcagctaatttgatagtattctatccggattacaccatccttatatattaaggtaagaatgctaaaaattggttttaaaaaggtaagaatgctaaaaaaaaagttttcccaaggctccttgagtttatttaaaatctcatgcttcttcacggcatatgaagaacatgtgtatgtttctttacatatgagatgtttgcctcatgctatctcttgtgtctctttttctgtttccaggccttctgccttatctagtagcccgacgtatccagacttgcccttcattaggatctccccacaccgtaatcccactgcagcctcagagtcccccttcagccccccacacccctacatcaacccatatatggactacatccgctcattgcacagcagcccatccctctccatgatctctgctgcccgagggctgagccctacagatggtaagtctcagacacgtttgtatttcccttgcaacactgtataaagcagatccagcatatgtgaagattttcccacatgacagacaccgaggaaagaaaatgctttaagttcaaaatttaatttcagcttatagcactgctttgtgggtggtggtgtccatagttttgtaagaatagcaatatagagaggaattaaatttagagagtaatcaaattgggattcatagcaagatctgatggactcacctccctgccataaatgccctcctcttctgcactccacacatgattaggcaagcccttcaggtattcccatgacagtatgaattccctgagtgccttgcccattttctaatgaatgctcttatgttctgtatatcagaaagacacatttttacagatatgtctctgagaacagagcttgacacaccactgtgtatggggatcctgataaaactgatagttcttggggcagaccagtgtggagtgggggacctgagtctttaatctgatagaagcttccaggtgatgttaaggctgttggcctatggtgggccgtgatataagtagcaagagcttaggggaggaaaaggacccattcttaagtgtaccttcagcctctgagcatgccaagtaaaactagaacattgagaactaagaacaagctagactttattcctgtaattcctgatgctcattttagacttcaaatgcaggcttcatttggagccggctattcataacatcctatcagcctattccttaaggcttgttgaaatattgaatgtgtcttctaggtatatataaatgtttgcctacaaaggctcaacttttcattaagatacaaaactaaacaagctttagtaattgctggtgggggctgtgtttgcatgctttattatagaatataagtcactgctggtgttacatagtaaagagatactgtgaagttcatttcactaaactctctgctacaacttccatacctctaattctaacattggaactataatctgagactgtacacagtgtcagctgtatgaagtttctgaggactcgttcattctcatgtatgtccaggaatatccggcttctacaaataattactcccttatgtatttcctttttaaaaattccgtatagcgaatattttcgtaatgtagccaagagatacattttttctcatttgagcaatattgacattttaaaaacctacaaaaagtaaaaacatgattaaacttttctgcttggaatttgattttgtgataaaggatgttatgtagtaaatagaaccaaacataaggaaaatggataaggagataagaaataggctcaaggtgcaattggagttgctgtacctgacttgcagaaatttgactggctgaggacttggtagttgtagttactgaatggaaatcatgcctgttgtctgcatttaattatcgtgaattaaatatccattggttgattggtggttctgccttccctttcctgcctcatgagactctaattaataagagtctaagttacttttccactgctatgaggaggtaccatgagcaaggtaactaatagaagaatttatttgggcttacagttacatagggatagactgactatcctgacaggaggcaggcagacatagcaatggtacagtcactgagaacttcccacgaccagaagtaggagggagggagagagagaattagcaatggtgtgagcttttgaaatttcaactcttatctgcaatgaaacatttcctccaataaggccacacttcctagtcctccccaaacagttccactaactggggagagaatagtcaagcttattcacttctggagtccattctaactcaaagcatcatactacccagtcagatcatttcagtaatataattaatataatataattcctcttgtagtctaatactttaaagatactcatttgtgctatgtatcatgcataaaaagtattccatgtggacaccaattgaaaccatctgttgctaggactttttgctgtagctagtaaagtgtctctgctcaaatgctgtccctaagcactttatgaatgtgacttgacttctggctcctagctgcttcatgaaactttctgaatccagatttctgaaaatctagaggcctccctcagaagtgctgcttttgcacgtaaattggcaggtggaaactaattattatcccactcatgtgagaatgactcttgccaggaaattgttccagagtgataggtacattttctttttgattttgtagtggtgggagaaaagggaaaaggagagcttgtaaattctggaacatgaaattgcggcttatcatgcagttgtgtgtcagtagtgggtgctgctcttttcctctttcctgtaaactctgacttcttctgttagtgagtgttaactcagacactcctgtcaggagcctggggaagtattttaagtatgtctggaaagatatctcagttgtctgcattgtctactattttaaaaagtatgaacatacagtaattatctttaggaaactatttcctttgcaggcgagggagtcaatcatgaccgtgtacatacagcttaatttggtaccaacactgggacaaagttatgtatattggactccccataaattacactgtctagttaacatctttgctttcttagtatatacatgtctcctctgtgatcccaaaatgacaaaattacctgaattacatgtctcttacaatgtgtcccatcttaagagatacatgactatataaaaattcgaattcatgataatttaacaaaaaccaaaacttttataatgtattttactatttttattcctccagtttttccttccagataaagacatgatgcaaatgaatgcatacgtagaacagctttattgcacaagtcataaaagaattgtgtttgaaggttaaatggcaagtaggcttagaatacttccaaaacagtgtctccttgtctgtcttgcaattgtcactgtcttgtttcttcttgtagctccccatgctggagtcagccctgcggaatactatcaccagatggctctgctgacaggccagcgcagcccttatgcagacatccttccctcagctgccactgctggtgcaggggccatccatatggagtaccttcatgccatggacagtaagtgacagggctggttgctggagagccgggagaggagcagaagctaagtaggaaaatggagagcaagctgcaaaggttaagctaaatttccaatctaaagtaagaaggaaccaccctgaggtgaccttagcctcctggtgaactgaaatgtgcagcgaattgtagcttggtagcaatactagaaatgtagttggtcaacaaattattctgttctgcttcttgtaataagaaaagaaaggaacagattcctcttggattttgtgtggccgcttcatggatttttatcctttagatagtaggcgttaatttaattcaatttatgcactcatgttaaaatactgtgcttcatgaagaccctttgcaggtgctaagaacacagaaggttcataatagttatacttagtggggggaaatccagagacatctccagattttagttctgggcagtgaaggaaagaagatcatgtaatttgcatgccacttggggcatggaggtgtctagtggtattaggattcctttgggtagcagtgggcctatgatactgctttttttttttttccttcttgctccagcccaaagaattatttgtttattatatgtaaatttgctgtgtctgtcttcagacacaccagatgagagtgtcagatttccttatggatggttgtgagccaccatgtgggtgctgggatttgaactcaggaagagcagtcagtgctcttaacccctgagccacctctccaggcgataatatggctttttagagcatttcaaagctctatctctgaaaggacctgttcagcaaatatcctttggcatgaccttgaggagtgatgctaaagtccagctattatatcaagtggtcaacatatgtttttggtttttgtttttgtttgtttgattgtttgtttgcttcttagcagtggtctttgacccttgtccagctaggctttgtttggagtcattcttgtccgagaagtgcttctgttaatctaggcctcaaatgtggggattaggaagggatggcggatggtccacataggaataaagttgccagtctgagtctactaaccacccaggaccaccttggtgtcctctgaaggagtgtggcctgatgctggcctctttgggtagcctgttaccacacacaaagcaaaagaactatgttgcgccctttgtgagggttttgttgttagcatcagtagcataaagagcttaagtttcagattcatcataaccacatttcaattagcaattgtttggggggggggaacagttcactgttattatgcaaattagttatttaaaaatctgcaaataaagaattaaaataagagagactccttggaaggtcagcctgcattactctctctatttgataagaatgtgtttagtcaggcggtgccttttttttttttttatctaaataaaggatgaagctacccttttactttgtaaaacctaattaaaggaattttaatttgccagagtatatggtaaattgactgtcattaagtaggaatttagatatcctatcattcatcacatgaaaagaaagctcctctttctttgtcagaaatttttattaaaacagagaaacaaaaacaattaacagaaactaggttggaactccttgtgctggagcagtaaaacggccctgtggctaggcttgtcgtcgctcagaggtagagttctcacctaggctttgcatagtttctacctctgcagacttggtggaagcacattgtgtgacccaggatggaccttgacatggaggcgagagtacatgatgtgacataatagactaagctggtatattcatagctctgaccgtccctgagattgagggaccatgagcctgtaattcctttaaggaacatcctaggggctgagaaagagcaagaaaatatggagttcatgctatacatatggcagagactgacttaaattaaactagtgctgttctcagagagaagcaatgaggacattttctgtgacctgaagaatttgatgagaagggtttgtcaggcctcgggcccctgactttgagtgatgtatagtatatttaaggctccctatgtctcatggtattacatcacctcccacatcactgatagttagtgaatgctagcatttagaaggctagggtcaatcctgatcatccttccaaaatccggcatggcgggaatactgagtgtctaggttatcttgctgcttttgagtcctacgagaaatggttgtgtgaaaaagtctggtctgtcactctagttgtctaaaaatgacagacatttcttcattaaaatctcttatgatgcaattaacttattgcagtgagtagacataaaatagttacattcaggatcagagcataataaaaatgagatgcccccttgaagactgggagtgtatggagggccaggattactcttctgtacttacgtgccctgagtctgcgggtgctgaagctgttctaaatgagtgaacccaatttaaacatgactgaaagaaaacattgagaaggcaccgtgcttctcattcagtgtggtggaatggtgttacatatggatgttgctaacagtaccattgtggtactgtttatggttgtgagattaactgtacagcctttcatactcacttcttctgtttcattaaattatctcagcaaggagggttgttatcttgcttgaggtcagttgtggtaacacaaacttttaattccagtatttgggaggcagagtcgggggattgtcagtttaaggccaatggcataccacccacccacccccaacacacaatacacatgtaattttctgaatgaggcaaaaattgtcacatctctgtaagcatcctatggaacataaaatcttctgtttgtacttaaaatcattgacagtcgatttgcttcttgtctggcagggtgaccttctgattcattaagctttagtttatgactgacttgtacattgatcttcagaaggcagacatggacaagcggttagcattcgctgctgtgacctaacactaagatcttgatgtctaacaaatttgaatgcaagtaatatttcactttaacccttcagttagaaatcaccatatcaagtgggcatatgtttaaattgagatactagcctccagtttaagaagcttaaagactgaagtttaaagacttagttctttaatggagaagatgggtccatctcaatatctttaggcatatcaggtcttattcacattcttggcagggtttatgcctcccaacttagaaagtttataagataccgccatcaacaacatggaatatataggcttagatgaggaggcttgtaggatgggaacctttcttgacaccaccaagcccaaggctgtataaggcaggactactctctgcattagaggggtttgacagtgccttgcctcttcccactagatatccatagtataccctgatgtcagacacctcctggggtacagaatcaccctaaattgagtatggctgacttgcggtaatgcatttataagttgctttagtgatgctgtaggtttaccagggagcatttaactgctgggttcatgagaaaggcaggcataactacacccagttctttattttagcatgctttagttcctttttttttttttttttttttttttttggtcattcaattcactgtcttaagatggtgtgtgttagagtggagagggcattgtgttgcaactgtgggagcctctgtctttgttgcttgtggtgaattaatgatgggaatatctaagcagctgtcagattcataaatcattagaaataagaaggctaacatataaaagtctctcccttttgttgggcaatttatcatgttgcctgtatattaataaacagtgctccactgaggtaaacccttggaagataaatattttgccctaatttcttcaattgtagccagtagatcacaagagagaggagagatgcttgtcaccacaagttgccaacttcttgtccctctccgttctcaccgagaactgacagtcaataacatatagattctggctgtaggtaatcaagttctgctttgtttctgtaacaggcaccagatttcccagccctaggctgtcagctaggcccagccgaaagcgcacactgtcaatatcgccactgtcagatcatagcttcgaccttcagaccatgataagaacatcccctaactccttggttacaatcctcaataattcccgtagcagctcttcagcaagtggttcctatgggcacttatcggcaagtgcaatcaggtacgtattttcctgaatccgttatgtgtctttataataaaatgtcagtgctcataagaaccagtaatccatctgtagtgccagtggtcagaagaattagcaggctgctgtatacatacatactaggattccggttaaataccacaacaatgagccaaagttaatttgtttgtgtgcattattcaatagttgttatatggcagttattcagtttcaatgagatctcttcttagagttagagaattttaaatctcttatccagttcttctgttgcaaatatttctgtagaataaaaactaactctgcctggttgcctcgtatgtaagagttggaggtacctacctagccaatcactggtgagttaacaggaaatctattgaaaacatatttcttatttttttaattatatttttccagcttacctttaaagataaaactttggttatctcttctgtgtacttaggtaatttttagaaacccttacatgagtgtaaagaatgtaagatgctattgctaatgatcagatttgggcttacatccctgaatatgaaaggaatatgaaagaagccatgctaagaatttgtgagatactcatgttgcttttgtcagttgatcgctttcctctaaacggtgctcgttacagaattagcagtgtcctagcaagtagttaattaagacaatcctgcttataatctttagctctcattttcactccagttttcaccatggtcccaaaattcccttacgagtaatctttgcatcacagttcgtcccactgtgggtgctccctcatcttggagtcatcctagtcgtcccactgtgggtgctacctcatcttggagtcatcctagtgaacctggcatgaagccaggccgttggggagggaagacggatgggcattgggagttcaaggccagcttgggctgcttgacagtctgtcaaaaacaagcaaaatgaaaccccaggaagacacgatacatcgatggaacatatgatctaatcactattctcactagccttgcttttaataaggaagaatgtattttattatttttttttaacaaatgggcaagagctctagttattaattgatgagcctttcatggtgactttacatgtttgggaaacttcaacagttcagaaaaatgcaataagtaatactactgtctccatgtttattaagaataaccccttagaaggtggagaaagtagacactatagccaaaaggacggagcggaagtcatgaccgcacaacaaatccccatgtcaggagggtgcacgtttcagacgtacttgacggtacagacctttgaatccacggtggatcagaaagctaacctcagagatttgcaagagagcattgatactttgattggcaatctggaacgtgagctcaacaaaaccaagctgaacatgagtgtttgagatggacggcttattttatttgtgatgatgtcatcaagtttcatgtcaatcctttttctggggaaatatatatatataccttaagttaattcctaataagttcatgtcattcagttataaacactattcattaatatggttattttacttgtgaactgagctgttctgggcataaaggtaaccagaccttgagagatattttaataaaccttgccagttgtatggaggagacatgcagatgtttgtaagggtcgggtacgttattaccccgacaaggcttcggcgagaatgttcttctgtacgtggagacggatgttctctgcagaggacactgcagctggactgatttgcagtcagagtccctgtgcaatgtcatttggtcatatttcatttgcaatatgaatgctgctgctataagaaaaaattttataaatgtaaaattatacaggtattaatgtattttgtattaacatttcataattatttaagcttataaaaattaaatatttttatggttctgagaatatatgtttataacttaattatgcgtataggttttagaatgagggaaggggttggctacagcattccaaatattttaaaaataaggccaaagttattagcttaaaaatgtctttttcagggaaagaatgtttaagttaaaagataagttacataaagaccacttgaataaaaacgcaccagaactatttgagtagaagcaattgcctttctgtttttgctttgtagacacagtctccctgtggaaagttgtagtcttttagcttcataagggatcaagtgaccagatgcctgcacattttagtgacttaaaatgactccacctgctctgtgcatctctgtctcctgtgatgctctaagtatttgtttatagaggtatacttaacatgctgacttcagtaactgcccttgtttctaaggaagtcatcttgccagaatgctacacgttacaaaatttttaaatgtattaaaaaaaacttttatacttacagaatgtgtaattttacaagtataaatgaatatgaattactaagtataaagtgtgacagccataaaaaacaaccggtttctcactatttttctaaatattaaggtacttctatgcaatacagataacacccatgtaatttgaaagcccactagtatgaagaaaaataactacttttatatgagactttcatgttttaaaacattgtgtaacaaatgtaaccagaggtgatgctggtatgtatcatgggttaacaaagtattttcaaatgttttctagagaaagtacccgtgctttttgtttgtttgattgctatgtcatgtataatacataaataagtagtataggggtggaagtggtttattaaaatagtataacagtgccatgctattgtaaaaaataagaaaaagaaaaaaaataataactaatacccttgttccactaaaacatttttcagtgcagttttgatgttttgttttgttttttagttaaattgtcagcatttcttattggcaggcaagttagtagacccttgatgtcctgacttaaagttatcatttcactaaaagtggaagaagagattcactttaaagaccagtatggtctcaaaagatccagtggcagtcaggtgacctaggactatctcgtactcattttctttctttccttgagtattttcatgcatatcctctctgtcagtgggtcatatcagtctttgatatgcattcatagtatgctaagaacatttctcactttttttttttacatagaaggtaatccagtatatgatgagcttccatgtaccattataatacagtaaatatagtaatggtcatgtcatctccacttgccagggaaactttggtatattgttgtccctagacctcaataaatcagctcagcaatcatcaattatggaccaggaaatggcagggaaaggaacgattcttgtggataccctgagggcagaagctgatctgaaaaaatgagcagtgcaaaaaaaaaacaaaaaaactgagtaggaagtacatttgatgtctgagtttaactgggtaagcatatggacaggcaagaagcacaaggaaggaagaaggcacaaggaaggaggacactggccaatttactgtgctgggtgaatattggtgccaccagctttgcagtctcctgcccattactttaccccaaaacaagcctgacttctacactcatcattttgcaatgtctacctcattgttaatgttggcagtgcatagggaattatacacatttatttgttctgctattgtcttccccagatattataccatcatagcaaaagaaggcatttcaaaagatccttatggatgttcaaatgtaaatgggatggagaaatgattagtaaatggattctctgtagatcaagtatagctttttcattataaatttagtgataaatgacgagggtttcctcgttggctgtttaagatctggcatggttaggaaaatcatctcgtgaaaattgtattccttgttctatctcccaaattccccagtgagttgtttacctctccagcttcacaggcgttggagttttcctgttgtctgtcagacaagtatggcctggtggctgttgtgtcctctgtcctctctttttttgtgccatcatcctctctgtgtaagaattctgtggaagaagtaagtcttttccatgtccatgcatgctgcctggtggaaaggaggaagcagtgtgttccacagctctctcgctctgtgctggtaatggaagtgaatgtctcacttacactagagaagcaacacatacacacagatgaattaaatggactggaagtagagaaccacaatgccagattaccgttatatttaaaaatctctgatcccatcttctaaaaattctgtggtgtcctttttacctccttaatattagtaaagtagttgtactggctagttctgtgacaacttgacacaggctggagttattacagaataagtagcttcagttagggaagtgcctccatgagatccagctgtggggcattttctcaattagtgatcaaggggggaggtccccttgtgggtgggaccatctctgggctggtagtctcagttctataagagagcaggctgagcaagccaagggaaacaagccagtaagtaacatccctccatggcctcagcatcagctcctgcttcctgacctgcttgagttccagtcctgacttcctttggtgatgaacagcagtatggaagtgtaaactgaataaaccctttcctccccaacttgcttcttggtcatgatgtttgtgcaggaatagaaaccttgactaagatagtagttaatagtatctttttttaaagataattttcttcagattatttaatccttaaacatttgaatgagtttaactacaagctaggtgtgaaggctagacaaagagtaaatgagcctttcaccttcaaggaactttcaggaagaaatgcctcaaagcagacatgagtaacggagcagctggtgggacaagcttattgattgctggtcattgctgcagaaaaaaaaaaaataacccgggtcgcaggaagctgagacctgtaagataaagggaagcaacataggcaacactttctgtgaccacctaagagcagtgataagcagatagctctaatgaagggaagagcagggcatttgaacaaacagcattggaccagaagactagaagagagtaagctatcggcaagtcagctagggtgcaagtttggggacattgacagagcaagcttttgcaatgtctgtgactgatgccataagaccaatggaaagctttgaggaggctgtttaatactaaggctgtgaagatgtgctcagaggtgggctgtcacaagcgtgtaaccaccacagtgtcagtctgctgggtcctctgaccttccttctgttcaccaggttcctgttcatcaggatgaactgcctctgaaacccttgagtggctgaaacacagctaaaacaatcctgggaaataccacacacacgagagaagtaatagtggctgatgctgctcatatgaacaggactttcctaactgtgtgtcaatgctcagcccattcactgccttgaagcttgtgagtgacttaccatacagtaggccattgctatttctatttatggctgcttggtggcaagtaccttcttagttttctacatcatattctcaatagaaagcctagtacacattctccagggctactccgagtatgcataccagaatataaaggttaggacacattcattttgagtgtgtgcatttgtacctctttcttctttcctgctgaggcttaactgcctttttctattaaatgtgccttaggaatttttatgggtggaagtagaagtttttattttgtttgttctcaagtataaccacatgggtgcatatgtatgtctatatctattcatatgaatttaatagaagctgtgaggccattctctgcaaaactggaaagattgttctttgaaaggcagctgttgtctagtaaatgaccttgttagcccagagcccaaagcgtgactaggaaatctggggtgattagaaggcagttcctctaaggtcagttttcaagttgtgctgtctgccgtccccatgctgcttcattttacatccaagacgtatctggttcatgagcaaaagatttaggagggcagaagccagaaagcaagcacagcccttcgttcttctgccttagagatctgggcttatccgtgtcccagtttatagtaggactctgttcctgttcagagtgttttgacctgaaccaagtgcccacatttttaatcctcatactctggggtggatctctgtaagatcagtccaacctgatctacataaagaactttgagaccttgtctcaaaaaatacatccacttcacttctaagaattaactggcatggcaaattaggaaatatgtatttattgatagtcattaaggaaagtagagtttacatttaaagcaaggcattcccttagactccagaggaatcagctattgttggcacaatccactggatttaggaacggtgcctctgagacttgctgtgtctttttaccttccacttcggggctctcatgtgtaacctcagtctctcattagccaccttcctaaccaactctgctcagctcactctcaatcactgagagatttcagagatgaactcggaaacctaggaggctttctgctgcatcctcgtagatcaaaggtgtggcatacttaactgcctggctgcccgtaaccacagctttgtggtggtttgacacaagaaagaaagaacaccacctctggccgccattttatatacatagggaagggcaattatgtggttactatagggaaaaactattattttcagggaaaacactgctttttattagttagcacacaaatgagttttcagtatattatttcacatgactgtgctatactccaacttttccagttcccatccagtggctgagttctgtagcttcctcctcgctttcattttcatgtaaaaaacaatcacttcttccagtgggaaggcctgcatcagtccaaagcctgtggctttattgatagcacaattactaagaaatttagcatcacttttcctaccgcccgccatacataaaattcctcacaactttaaaaatacattttagggtcttcatgtaagctattttcatgggagttttccatgtgatttgaatatgatgactttgaaattcctgttaatagtaaagttgaataaatgtttaataatgtatttctacagtatgaacgttcagtgtcccacttatatattaatctgttgttgtaagaaataaacagaaatgtgatttactgactgctcaaagggagtgtgtgtgtgtctgttgtctgtttgggtgtgtgtatgtgtgtggactcataacttattgatgtgacaaataatgtgcgtaataacatgactgcattttgttttaccaaattgattataattactaaatagcctcccagctacagatagggagacatgtagatagaaagtactcagttcaaatttctggaattaatgaatgagatgcattgtatataactaatggcagttaattaactgtcatttaattgttttatgtatcttctttctgctaacatctccaattttacccatttggggacagttggtgagattctaacagacttccatgcaggaaactgctgtattatttaccacaatatgaagaaacagcccaaattttttttggggggggggatgaaaattgaacctaaggccccccaacgtgctaagcatgcactctatccatgaagtgaacattgtaaaaaaaatcttaatttaaaaattttgttgataaaatatacatacaagctagaaatttctgtctcagattttgaaaatcttatttagttttttaaattgtataaatgagtgtttatctgcatgcatgtatgtgcatcacatgtgtgcttggtgcccactgaggccaaaagaggatatcagattctctggaattaaaatgatagttttgagctaccgtgtgaggctaagtacttagtcccagtcctctgtaagagcagtgagtgctcttaactactgagccatctttctgccttggaagtcttgtttttaagtctttgggaaaatgagctgctgttcacatagaagtgtgagagagggggacctgactgagcagttctgacccagctgtgctcaggattctgcagggaagccatgggtctaaggccctgttaaacaaatactccagtaaccataaattggtcctgattagtcaacatctaaaagccaaattttctacccttttactcttggaaaagtaaagacaagtcggggcttctgttagttattctggtgatccagccagtgtcaaggaattctagtgcctagcttttgcaagtgtttgtgttggagatgttttgccagtgtgagttaacctactcatatctgggaagaaggaatctctgttgaggaattgcctccatgaggttggctatggggctttttttttttttttaaatcaatgatgatctgggtgggcccagcccactgtggatggtaacagtcctgggcagatggtcctgggttctataagaaatttcaataatattgatactttgtaaagaattatagaatgagtatatgcagtattttgcaagggcttctgaggcatactctttaagtggaattaacctgttctttctaattttgccctttgtaatcaacaaagcctctgttgtgctaccatattgtgagaagcgaagttaaacgttagctttgatgccttaatactgtttgatacatatgctgtctgtagttttcagaggaatactttttctcaatacagcttttgactttgggtttccctccctccnnnnnnnnnnnnnnnnnnnngttgggagtttaatcccaataagtatttattttctgtgaaacgaaaaaagggttcttatattaggaggtgggcctaccaaaaaaaaaccaaggcttattgctccaaagggttaaatccacgtgagttgggcttttattttcggcaggaaagccaaggaaccatcgggtccaacttcaattagatcaagggggcggaaataattaaataagttttgccttaaattaaaaaaaaaaccctggctttagacatctttaaaaccaaactccagtgaagttcgttagttggtggaccctttaatgtgccctcaggtaacccttttgtctttccgggaagagggtttttgaatacattgggatacgtgcctccctccctccctccctcccttctttctgatggcatcctaggtatgatgggcagaataatagcccccaaagatgcccatgttcgaaacccttgaacctatgaacaagttaccttatatgcaggtgtggttaagctgaagatcttgattttagtttgagttatctgtgctactaaattaatgaccagactcctgtgagagaatgccagaaaatcagtcaaaagggagatccagagtgagatggcaactggagccagggaatgtgagcagcctctgatagcatggaagagccaggaaaggcaggagctcacggcttcgtgcttaattctagaggcaaagggatctgagtaggggtcacaggaagttctgctctactttgtgaactactactcgttagtagtcctgattcccaaacatctactctgtttttaaggccccaattctgatgtcacttgcagcttaagtatcagtggcctcttcctaagtttccttccttcagcctgctgaatagttcaggcccgtgagaaactgaaaattgtatagaggttaatgcagggtctgtggacgatctaattatccctgaagtggggtcttcaggttttatttctttaatgagtagactaaggtacttacacttggtaatacacattcacccaaaggaggtggaggtgctaaatcagtgtgggttttgatgaatggcttgtacactgaaaaataaattggacaaactggcacagagctcagtgaacatgaaatcagctattagaagaaagcttgtgaacaaattctgaggtagatatgcatcttttgattaatgccctatcaatcatccacacagctaccttaggtgagtgttgctgtaatccttcatggttgcttacagaaatacaggcagaaagtatagcactgtagaatagatatcactacttattctaacttactgtgaacaggcacagtttttaccatgtttctgctttcctttattcaggaaatacaatgtaaaatgaaaggcaagaccctcaaagcctggtggatttctcttagggtgttcttaatggtattcacttttaaatgggcaagctattgtaacaggaaactctctgtaggaataatagtaatgaattcttattgaagctgctcttttatgggttatagtcaaatagacaaaaatgtaaagtgtgttaatgaagggagtatatctctggaattattactgaaagttgttgaaatggtttgaattttgttattgtaattattttattctcagttaatgtgcttagcagcaatagtaattaacccaccagattggaaatttgcatactttctacctttaatatgagaaacactggttctttctggctaacattatagttttgtgtgtgtgtgtgtgtgtgtgtgtgtatgcagtacatttattatcaataatgttgtatagaagagaattttccatggatagttattagttctccgtgtatttatatgccactggaaagtcctctacagtctgtcattgcttttagaggatttgattcctaaactgtgctcacagaaaacttctggacattggccactggcctgagtatcttgagataaaggtagcacttcctggggacagactgtgacctggaaaatatgtggcagaataaagtggtgacaggcattaacatgcataataggttgtaatggacacttaatgctggtgtgctggaggaaggagctgagctctcccactggaatattcctccatcaaagcccattgatcactgatttcagtggggagagcttaatccatcagcgtctgtaaccagacggcactgatggaaattctttaggtggtattctggatgaaccaagctttccatctttacaaacaaatgagtgatatgacaagcatggtgttcaaaacacatttaaccaattgattttctttcctcttgtaataagatctggagacatatgaaagcgatcggtgtgagctaagattaaagaaattgctccatgcacaggagcaagtggagcccagagcactgagcagtataaagcatggagtcacacattctcttttttctataaagtttgttattgcaataaatagttattattgagccgatgccccttatttccactttctagaatcttccatcaggattgtgatctgggcagatgtgcacatatgtctgatcttcatgctctgctttttcttggaagtattcaaaactcttggcagtgattgttcctaatttctctcatcagaacagaaggacctggtgtgatttgggtggcttcagataaagctataaatattcttagtttgtgatactctctggcgtcagcagaagtgatcattttctttctcatcttcctccacagccctgcattgagcttcacctacccctccgctcctgtgtctcttcacatgcatcaacagatcctaagccgacagcaaagcttaggctccgcattcggacacagccctcctctcatccaccctgctccaacatttccaacacagagacctatccctgggattccgacagttctgaaccccgtccaggtcagctctggcccttctgagtcctcacaggtgagaggtgcagccttgcttcagcttggtccacagaggccttatcatcatgctggttgttagggtcacagggtccatcattgttaaggcttcatacggcatcttgatttttctctaagggtgtattcagttttgatgaatgtgatccagggcatcttctatcagagccgttagcttatgattaaaagtaggctagctgataaagccccactctagtgatctataaacttcatcttctattgatggtctatgtgtgtggactctcagccactatccactccctccactgtaaccaggctactactgggcacaatatgaccctccatagtaaacatgaaacaccagtctctctacccttttgccagcctggggtggtttaagggaaaacatcttgatgctataattgaggaacttcactcatagtttcttctgatctcccacccaaactcaacattttcggaaataagtttagcttgttgaagtctagggcacttcctctcttcttcaagctttcacaagccacaagcgactcgtgagtcagaagtgaagaatgcatcatctggactctcccatgggtgactggtgttaacagaatcctcgttatattatcaaacaagcttgtttgttttcagactttttttttttacttgagttccatttattaacccaagcctgattttttttttctgcaaatatgaccagcagagcaagcccacaagcgagtctgcagtgagcagcactggtgaccctatgcataataagcggtccaagatcaagcctgatgaagacctccccagcccagggtcacggggccagcaggtaagacacacaggctttccaggggccttttcttctctcacggtgatttgggatcagttcctcatcctctccatttatacacaacatttccctacccactgtgttcttgacattggccatgtgtttgaaaatgaccccattagcgattggctgaattcatttctctagttcaaaaccaaatacttgcagtgaaggatgttatgtggggatatgtgttcttcataggtgagatggcttagaagtttgagccatcgtagtccagagagtgtttggttagactcgtctgtttctgttcatagatgtgatgaggcttcttatcactgacctcgaccctaagttcctgagcttctggcctcatgcttcagctcagcagtttatgatgtccccttcattgattatgttctccacttttcttattttgctactttgtacttgttcaaaaagctcagagaatcagaagagactcaagtcccgccaaatagattcaggacggaattgctgatcacttaaatccgcctcttctaaagaacatgtagggtatgcccagattgccgtttcttatgcgcttgagcctggcatggcaggtttgatcagtgctgtttccctcaagtcagagcttagtgagagtcttcaggtccatgcagtcagaactttgttatcatctgtatggttcaacccagtccttactgaaggaaggcaatgggtccctccatgagaattttgaagactgaatgaggttatgataaggagggagttctgaaataatcctcgtcatagcgtgctggagaacaaacaatgttgctgcttacaccatggtgtattcatgaacagtttatcatgttagcctacagcagggctcagatctgtctgtgtagctagtgcctagaatcctggagagtgtttgcattgcatttactaagaagctgttgctgacgactaggaaagtctgtccagagcatcgggtgttctttccacggcctcaaccatgagtcagacaagcatttccctgaagacctgatattaaaccaagaaggtgtgtgatccctaacagaaaagtctacaaagtacctctcacatcaggggagagaactaaaagtatgtcagtgccattcgcctgcattataagatataacaataaataaagcgatcgaagacaatcaaaacaaccgaacaagatagggacagtttggaataggatgtaaaatatgctactcttatgggttttgttgttatttaatttttgccttggatttttttatttgtttattttgttgtttgtttgttttaagatgtcagttttgttcctagtctctggagcagggccaggtttcagcttttttctttcttttccactctgcctgattttccctctgtttcttgccttcacccttccaggaacagccggaaggaacaaccctagtcaaggaggaagcggacaaagatgaaagcaagcaggagcctgaagtcatctacgagacaaactgccactgggaaggctgcaccagagagttcgacacccaagatcagcttgtgcatgtaagtggctgctgtgtggggacggacgcagcttcccaaatcagcgacctttgcaggagggcagcggctctgaccctgcgcggagtcaagtttcttagctggcagcactgagaactggagggggctttatgattttctgagaataaaggaaaccctgagccatggtgcttgacctgttcagtcagctaaagcttagtgtaaaattcaataaagtcttcaatagagagtgtaatgactctgatcctgtaagccagaaaacactattttgagttagaggctttgatggttattgagtaatagtaagctggacatgaattattattaaccttttaactaagtttcagtccccttccaggactcagtaacaatataaaaatattacaaaaacacatgggtccttttacagacctcaaagttgaaggagcctcctattattgtatgtagcaatgtagcgctttatttttgacctgaaggcaacattgtggattaaagcttgcatggaaacaattttgtttaatgatggaaaccttacagtagtcacgttatgacaccattccttctcttaccaaaccaagggcagatatcttgagtgttatttctgatgaatacccatagctcctttgctgtgtctttgtcatgcttggcacaaactcagatgccagtggagcattctagccatataagaccaagatcaactgccatgggacagcatttagagtgtctggaataagaagatataggctgagatgatgtctctacagaagcgcagtgtcctgttaaggcactaaggatgattgtaccaaataggacagtttcttatgattgagcatctctatagcgcagtggttctcaatcttcctaatgctgtgagccctttcttcatgttgccatactctccccaaccacaaaatcattttgtcgctatctcgtaactgtaatttttctattgttgtgaattgtaatgtaaatatctgacatgcaaccccacaaagggcttgtgccctacaggttgagaactgctgctgtagcgattgtgtcaagtctagcacacgagattatgagaaacgtgatatacagaatgttagatttcacctcttaccagcaggacctcacttcttctctttaaatcatgcctctttgtatatgtgtaagtagaaatatagatttctcaagtacagccaaaaagtaagtcaaatgtttttaattagcgtgtattttcaggtttttccacacatgaaatttgatgtttttttttccttcctcttttgttttattcgaggactaattttaggctaagtctggcttaatgactctttatttgtgctgactgctttaatggaaagcacaaaggccttgtaggaagtattctcaaagagtaccatatgccaggaacattaccagtgaggatgagcgctatagtagcacctgaaccttatcgctacctaactgataccaaggcctgttagggtttagggtttttttcccccttttttatcttgtaaaagcattgtaaaggcagcagctattgcagttattttatataatctcaatgccaagattcctgtaatgtctcagtagatttgaatcatttctgtgagaagggtactgatgctaccagttgaatgaccatggtgtttacagttaaatggagcccatcttcactcatatgactgcacacatacagcagcttgtgaagattctaaatcacagagaggagattggtgtctctgggtttagtcacgacccagtgtggtacctttatgaccctaattttagtctaaactgaataccagagtaagcaaactgaattaagtgagttaaaagttatagcttgaaaaacctgtggttcccatctgaagggtagaaattccacacgtgtgcaattcagttgcttgtacactgcccaagctatgtgctatgctgtcctgccctgggtgctgctggacacaatagtggtgaccctgggcaaaacaggtgctttgtattttttttttttttattaaagtaacaggtatttcaagtctacctaattactttggtgggagatggaatatatatcagtttttagggaaagatggaagccttaaccattttggtttttgccactttccttagagtgcagacattttcttattagttggattttcatgccacatacaaccaagcggcaaggtgttaaaccattctgctgctctgccttatttatagccatgacccattctttcccccctcttacagttaatagaaagattcatgattcttcatggttgtctatctagtgtctgacagtcccgactgcctgctaaagcaagtcactatctataattgatatcctgccgtggaatagggtgctggctgcaattgaagggctttgctgaaagcccttaaatcctgacaagttctccccttgttctgcttcagtcgctgagctgcaaggttggaattccagagctatttgaagttggtgcaaaagagagacatgtgtttcacattagcaaatcgcaaagttgaagaagggaattaggaactggctgactttccctgccagtagtctcccttctagtgcagtgcatgccgtgttctagggggaagattacctcctctattacagtctgagcagatacgcagaacatggcctttcctcctcttcccttttatttaaagcccctttcctttcccaaatggatgttattctagatgggctgcagccaggatctgttatcacagtggttcataattaactttatttcacagcaaggtaattatagctgggccgagtcgctcttaagttagtattaaattttcaacaaatttactttttttaccagaaactaggaaaatgtacatgtatttcaccaggattttgttatattttgactctttcttggtactggttaaaatagaaagcaacaaaagcacaagaagaatatgtagtaaaaagttaattacaagtacttttgattgattgattgattgattgattgaatttctgataaatttgtcaagatccaaacctgatttctgaaagacacatattgtgatgtttcagggtaagctgcaatcccacatttctggtcagctttgaagttgccagattctgctgttgtgcgttacgttacagagggcctgtgtgtaaatgtgcttccgaagttgggctgtgtccgttcccagagtattcgccccaacctttactgtttcttacttaactcagcctgtgtcatggaaagaggcgccacccaccttctagaccttgctcagctcagcttctttcttcgaattttgtcctaaaagtgactctacccttgacttttggtagtggagacaattgaaatcctcatagcgtgaagctcaaggttgtcttgtattctctgaagcctgaaggattcgggggtcagtgacactgggtttatgtcacagtgtacattttagagtggcactgctcccctggctccctgagcttgtaagcatcattgttgaaatctgaaagaagaaaatcagagcagtcaatgttcaccttgtccagcttcaagtatgacactgtcactcttcaacagatccacaaactcttaaaacactgcctttaaacaaatctcccgtagtcttgtttagtgattaatacatacaagatctttcccaacagtctacagaaagtagaaatagttcttagcagttttgttctccaacgtaatttctaggaacacgccccaggatggtggtgccttggcaacgacagacggtcacggtatcttaaaactgaacttcaggcaggaaatgggtttataataacatctgacttcagctgggtggcatttcagtaaatgtaatcctcggtctgcatctttaaagcatggtgtcacttttttttttctttttgaagaatgattagccacctacctggattacaaatgcttttatatgctgcaaattttgatcttcaaaagcatgctaaagttctctcctaatcacttttgctgctgattagaaacaaattctgtacatttgcagcataaaaatcaagagctttcattttaatatcagaggttcaggtgtataattgtatctataaacacacaggagcgtttgatgtgaatatattgttttcatagtaaatccctaatcctaaacttgcatgtcatgtcccttgtctaacttttaccactgtactaagttgcattgaacatctttacctaatagaaaattgggtttaagatgtgagaatggtctcagacgtgaggcagggatggattggtttcatatctaaaatctaaaatgagcaagtcgagattttgatcttatttccttctacctgtagttgctaattcattttcctattctaatatttggaaatgaggcatgtaaaatatagaataaaaacgacaaacttcaaagtcactctacaatgatttttgccctaagggtcgtgtctttttgtgaagttcttatctaaatttcacctgcagaaagcatttacatcgaaatgtatctaagagattgtgctgacggggcaaggaatgagggttgtgtgtgttaaagcaacccagagcctcaactagattctgagtagcagcctcaccccagccctgattcagaatgctgtcccagacaccacttgaccctttcagacattattttctcacttatcagagtgtgaaagagtcgtgaaaataaatactgtcccagatgtccaaggccaagcagagatcacattcagtggaccctgtgggaaacagacatcgagtctaaatgaggcaattccacctcttgtgtgtttttttgaaggctgagttggggaggacggagcgacgaatctgttggtcttggggttcctgtgtccattctaaggctcttcttatattagttgttgctagacttggactatatgagctagggagtgccacaccctgctcagtcccagcaccggcatgggctcattaaacaggccacttggactcttaaaaactgatccaccctgttgggagatatagctacaacaacatgaaactgttagcttcacgtatcgtaaaaattgccttcaatataatgttagtgattcttcttataaaagagaaaaatatagtgctatttcaaggttgttatagcagtgaagcctgctttagattgctcttaggtggtctccaagtagggataccagcatgaaattaggatctaaaagttgtggaaccaacccccagttcccaaagccgcctctgagaagctgaatgggcttaggccctacttcttagtaccttgtactgctaacctttagaggctctctgtgggttccaggggtctggaatgctctcaaagactctccttaaggtacagcaatcagtgtctgccgcagacactgtcctacatgctgtaagatgttgaaaagcattcttcccactgaatgcctgtaacacctcatcccccaactaggataaccagaattttctatatatattatcagctgtaccctgaaacacaaagtggccgctatttgtacccttccccttacagtgttgataaaagttattcctactttggaatgttcggattaaacaggaaggatggctgacttgttgtttgtttttgttttttaatctctggcaaaaaaaaaaagaaaagaaaagaaaagaaaagaaaaaagaaacaaagataaggaaatctccatgtgggctgctgaggagtgaggtatactgtctgtgtatacactggcagagcttcttggaaattacacttgctaaggttggtcactcactagtcttcagcatgacccattgccagccgagcctttcttctctgtgaaaaatgcccaactcatttttttcctgcagacccaaggaagttgctcagactccagcctctgaaatctctgcaagtgaggttggagatcatgtgcctgctttgacataatccagttctaggaacaggaagccatttctaatgtaaagactttgaagattcagggacatttatgtttttctgaggttagccgaatactgccatcaatgagttactcttttctacaacaattaatgtcagcaagaaaatgtaaaagagccttatcctcaaaagactattatatacaggacaaggccttaaccttcaaccagtctgctcctcccccacctttccaagtcacaggagtaaattctaagaactgcagatcgtgaggtagagattttgttcctaaatctgcccaaacttgatttcttctattatacctacagcttaattcccatttctcatctttaaagctgtcatagtatttaacttattttgttcattttctagtttgactttgtttgggagttttggataaggtggactaattcaagtactttgggtagtagtgtttattcagacaaggaaattgaatctattggagttagagttaataaactcaagtaaactgaatggtgaggccaaggaaatctttcatttgtgtttcattaaatagaaataataagtagtccactaattcagtctcacatgcttccggtataggatccttcctacaaacatattctacgccctggtgaccacagcaaattgtaagtagtctctagaaggaaaaggctgcgtgagtatcagacctggagagctgaggctgacacactcaccttagtttctgagttttggggtaagaccacggggcagattattttgaagtactatgcacataagatcaggacgttagggaaagaaagcagacgtgctaaggaatgaatgaaaggtcttgtggagataggatataaacattgtcttgaacaaacaacaagtaaactcaaacagggaaagactgaagtagtaaggtgtttagtagtctatgttagaatagcaggaaggagttaacagtggagtgtgattttacccatacatatacctaatgcactaataggctgggttctttgctatttccttggtttaggaataaaatgccagaatggtttattttatgcatcttgggcaaagggtggcaagcatcaatcttcatgaggagtgggagagtaggagggggagttgagaccaaggaacaaggggaagggcttgctggaggaagaaagtcttgagttgaaatcagctttgcaaagccttggtagctgtccctgcactgaagcagccaaggttgtggagtcagacgcagacctacagaagggattatctaaaattccttgtgaagtcttaggacacagtttacagatatttcacaattccaggcagctaatatggttgctacaagtgacagtcaaaaaaggtcaccagaaagctggttttacacacggactgagtcctcatctttggtttgtgcttattacttagggatcttgagattctgctttggtttggttttaaattggtttatcagggattggaagagagaatgacatctgttggacttccagaagctacctcctatcgtgagtcacgccttcagtgtcagtaggggtttatgaggattatttatttatttattcatttatttcattgtttaatgtttcccttcttgctgcactttattttccagtttgcacttagagccttgagttctccaaacgtcttatgttactgcacaggattttgtttatgtctcttaatgacacaccatctccctatatgccaccttgcttttttgtttgatacaaagtggtgctcccatattctagagagcaggacaggatacacagcaaagtggccctggcttatgagaaacaggtcttccttgtggcttccttgtgtgaggtgttgaatgttctcacaccttgctcagtacagtttccatagcaagataaagcagtcgaggcacaaaggaaacacagcctaatggtactcctccttgtgtttagcagagataaacttcagtggagtctcagtgctgagccgtttggctcctggcagcagctttaattggtaaaatgcagatttgatttgatttttcttgatcaggaggggattattttgttatcagtgcagagcatcttatttcaagatgaaaagcctttacggaattacagatgccagtgcttgtacaaaggttttgttggcgattgacaactcaaagagaaagtatgatttattagcctataatggctaaccctaagcaatggtctaggtctacagattgtgaaattgcttatgtgaactgcctttttatgccactcatgcccggggttacgcaaataaatgtagagtctgcactacacagaatgtcctaagagaggaagaaagaaatgaaggtgggggtggggaaaaaggtggtttctaatatccatcttggtggtgccttttacagtagtttggctgataagcctgcagaggaaagattaataacgaggcttgtcgctatcagtacctgtttgtcgattctctgtaacagggctgtctgtccagcatggaaattattgattaaataaaaattgctattagattgtgatgtgatccataatcacaaacaatggtggacattcctctttcagatcttcagccatgcatcaagttgttgcctttccccctttgccgtaatttatattgtgctgacatttggactcattaggtttatcctttctgcttgaagcacaagcagggtgactgctggacgagggggaggaggagccagacgaggaccagccagggcagaaacctggctgctgtgttccctggggtagcatgggagctacttaaacttgctttctacccccctcgaccaggaaaaaaaatcatataggtatataggtatgtaaactaagtatagaaatcaatatgtactcataggaaatcataaaattatattatgacaatcccttgatacacatataattttatcatttactaaacaaggaagcaaatttgcatgctgatgagatagatatttatttccatgataaatttatgtttgctgaatatttgaaacttaaaggatgtagaatgtcttcaacatttgatattttgaatctgtaatcatcattcatgagaactctactttgcataaccctatagaacagaatggcttaagttttgttcaggggcaactcagacattgttggaaattctgcctaatcccaagccaaatttacttagtaatatttgtatgcaatttgagttagcagtttaaacaggatttaaaaaaaatcaaacattctagtataataaatattataaagctaatagaaatttactgaaaatgatagtagaaaaatattctgaaagtttttgctatttagaaataaaccattctatttgtataggaagaaactttagcatgtatctaatttgtaatgttctgtactcaccatatgagcaaaggtgcattatgtggtatgtacaatgtgtggtgtggtacggccatgtgttgtctgctcagaaccaaggctgcagtaaaatctcatgacgggattgggtgaccactgtcagaaacacttgagattcattatgtgttttaccttgaattaatttttgataatttcaggttacaaagcattttgctattgctgatattttatgactctcattcaatttagatgttcagttgggaatgtgtgaagactggcgtaagagagaacagtgcccactgccttgcccactgctgggctcagttcagaccttacatatattcaaatattaggcacccatcacaactattgatgtccaccattttatcagcacacccctaagatgggtgcatctaccagggacctcttgttccactctccttagcccctaaaaacacagaatatactttctatttctatgaatatttattctgggtattttatttaaattgaattatgtaatatgtggttgctgtgtctgttttgtttgtttgtttgggatttggttttgcttgttttaatgtagaataaagtttgcaaggcttatatgtgccatggcctacatcagtgcttcatccctccaatcaacccattaatatttcttcatatcgctccaaacactttatcttgatgtaattgattgagataaacataagtgtttcaaatgtttgactaatgtgaagttataaatatattgaagcaagttttttattttcaattattttggcaatagccctcacagtgggagttacctctaagaactgccaaataaatggcaatttttaatcactctctgttggctctgtccttttgggtggctacacttccagggtcattagcctctgagatgtattttctagtttacctccctgggccacacactttctgggcagtgggccaggttaattgtaaggcacctgtatcgatgctgccatctatgagtttccacacatcactcagcataaatttcaatacatccaccatggccacttctcctaaaacagtgttgagctacatcaaagaaatgcaaatatactattcaaagtattagatatagtgggaggagacaaatagaacagtagaatgacaatttttttttctaagtggtaatttgtgtgagggccaggggtgacagagttcaggctctggtcagtagaattgactatagcttgcagaagctagtcttatgtgtgtcccccaatgagctcttaatttttagtcctcccaagaacagtgaagtctagaagtccccttacttgatcttgggtggtttaatgctgatgaattctccgttcatacacaaaccatcttttgttaatatttatttttttagtaattattttattcataaatgatatcccatttcctggttacccttccacacacacacccccatcccatgtcccctgtccctgctcccctttgcctctaagaaggtgctcctccacccactcacctactcccacctctcccctctagcatcccctacactggggcatcaaacctctgtcccctcccattgatgccagataaggctatcctccgctacatatgtatctggagtcctggctccttccatgtatactctttggttggtagtttagtccctgggagctctgtgtggtcctctaggttgatattgttctttataaggggttgcaatctccttcagtgtcttcagcccttccctcagctattggggtcctcaggctccatccaatggttgcctgtgagtatttgcatctgtattggtcaggtgctggtagaactgctcaggggacagccacatcaggctcctgtcagcaagtgcttcttggcattagcaataatgtcgaggtttagtgtctgaagatggaatggatccctagatggggtggtctctgggtggcctttccttccatctttgttccatattttgtctctgttttttcctttggacaggaacatttctgggttaaaaattttgagatgcctgcatggccccatccctcaactgggggtcgtgcctatttattggaggtggtctctgcaggttctgccacccctttgttgggtatttaggctagagtcatagccattgggtcctgggagcctcttgcttccctggagtctggggctttctagtggctaccccagctccccatcccccagttacgtgtttcaattcaatttcctgaccctctgtacttctgtcccttccaatacctgtttctgcccaccccctttgtttcttctccgctcctttctccttcccaggcccctccctccctatacctcctgtgattagtttgtttcccattctatgtacaattaaagcatctgcacattggtcttccatcttagactccatgtgggctgtatcttgggtattctgagctttggggctgatacccacgtatcagagagtacacaccatgtgtgttcttttatgtctgtcttacctcactcaggatgttactttttagtaccatccatttgcctgcaaatttcatgaagtcattggtttttatagttgatagactccattgtgtaaatgtaccacattttatatcagcttgttgacctttttgagttctgtggactgtatcttggttattctgttcttgtttgtttgtttgtttgtttgtttgtttggctaacaactgttttttaacttgaccctctgccctatattactaggcaatgaaatacccacctaaactagctagtgtgattctcaatcatggaaataaaagtataccatctgaatcatattcagataatttctagaaaactgcacacagtctagcagctcacattctggtatgctggcttacagttattgggtgtgttaaagaaagccaaagccctgaagagaagtctcttgtaagctgtttacatgcctgttccaatgaggaagagacatgcatttgtttcgttttattatatccccagtagcttctgatctcaagactctccattcctattcgcctctgtgttattacgagcaattcttagtgagttaagcagaggaggttgtgctgttcatacaggagggcccttgagtacctgggaaagaacgttagtgctctgagatgtttgctgctcctcctgtctcatagccacctccactccccttttttcctttactttttaatgttgatttaccctactctagactttacagatggaaacttctgttggaaatgtttttagaaatcagtcttataccccgaggattttttaataacttaaatgttatgtcctgtgagcctttcaaaaattattaagcctatgtattcataatatatttagaatactccaaaagaggttacagtgtgggtaagagtctcaaattatgggagttccatatatatagtcttacacaattctttctatcacttttccttttcaaagtacaattcttattggaatgtgcctcggccttgcttttgtatttattcaaacacagtcagaattagactttagcgctactgaatttgttctcatctgttctatgtataataatgttgggtttttctcaagcgacatgacaaaccagagttaaccccttatagagtactgattacagaccaaagaaaattaatccacgagtctgtcttataaccaggtgaggttcttggggccactcactgacaggggcctaggtgaaagggtaattgcaggagcatggttgactaaagagattggcatcactaaaaacatagggtggcaactcagattgcatccttggctctgagtacaaagctcagccagacagtctcttcctagcagctttggaaggggccatgttcataccacacctttcactggctccctgggtctttctaagtttcatttagttcttgagtatgcaccttcctctttgtctcagggaggaatgtttcagttctgagcacatagccatccaacaagcatatgcagtcactttggtgccctctttctacatttatttctgttgtttccctttgtgtgttcatgtgatgcatgcccatgtgtgcatgtgtgtggaggccagacatcaaagtcaaacttggatatcatccaccagctaggctaggctggctgacctgtaagatcctaaagttccaccaatcacttccccttagtgttgaaattgcaagcaagtatcacttcactgagttttttacatgggttctggagagtgaactcttgggcttctcacgtttgcatggtgatgactcgctggagctgctcctgaacccttcgatgcctccccttttgtgcctccctttctccctcctaagtttcttcctatcctcattttcttaataattcccttctgtcattttctgtcctctagacagagctaggctttctctggtcctactagtgtacctctaatggctaactgcccttcattttcctcctttcttttctggatcttaggataaaaatgaatgtataacagttttgttttgaggtagattagagataagaacgttttgtagactgcctctgaaacccctgtgacacttctgagcatcataaaagaactgatgtcaccatcacttgtacatccaatgtgctcttatcatcagggatctctgaaaaaaaatcagaaacttagaaactgagaagtgaaagatttaaatagcttttttttttccaggcagagtctcaccatgtagcctaggctggtcccaaactcagacctctatctgccttggcctcctgaatactaggattaaggatccaggtatctctagatgctgagaaagtctgaccagcactaggtagttgtttacttggcagcccacttctggggtcctgcaagtgttagagatgtgttccctaacacatggtgagccatgtttctttggattagcatttcctggtttggaccctaacctggacattgaggagttttagtcacttttggattttctcatgaccaatcctgaaaatttatgtaagaatacagatgaatgctcacatatagcatatgtaaaggaataatgaagctaacaagtttttaagtaaaacaatttatactctgaatttgtctgttaagctgccatgacgatggaggccagaactcatagcacatttgtcttcttcccaaagttctatacaaaaggctaggaatcacctcgtgttctaaaccatattgcactctgaaaagttttctacattctggcttctttacacccttcacggtcctccagtcaccagtccttggtctttggacacacctgatgcagaccatggcagttggctttctgttctgtttaatgaggaactcccagtctcaggtgtctgagggtgtgtctctgttcctgccctttctgtctgcttggttttagtgaggttcatggctagcctaggtgcaatctgcattgcagctgacaactaatgcttggctgctgtgctgtagcaaggaaggaggcaggttgtgccagatggtaattagtattggcttctactcaatgctgcactaactctaatgagctgtcagctgacctgcccagggtgctaagtttgttttctacccaacatacctcctaccccagcaggagactcagattagtgctcaggcttggacaggggcatttcttggcagaggctaatgatagaaatgctctgtagattttgaatacgaagtttcctcaggtcctatctgagacaggatccttgagctagcctgcacctccatgcattgtcctccctcgggtcctggtcacaaatgatgctcactagtacagtggtgattagatgcctctgagtcccaccctaaaccagttccgagagactgggacccagtaccttggacattccagggcatacaaatctgagaacacctgcccttactaggtctctaaactcaggtaaggatcgagaaccacaggcacttactatcaggcctcaaggctgtctcttggcaaacttgtgttctgagaactgatggcaaagctattgtagcaaaatctgtctgctatataattcagagtcccaaccacttaacagagtctccctccccctccccctccccctgcccctccccgtctccctctccagtgtgtgtgtgtgtgtgtgtgtgtgtgtgtgtgtgttttgcaggaattgaacctaggacctccagtatgacaggcgcatgcattgtacttattacagagtttcatctatgagtaaagggtgagacactaagttccttgtggctaaaaacaaacaaaacaacagcaacagtgacaaaacacacacaatttagttctaagagatgtcaccatttcactgggatgaccatgctgaacttgggattgtgacatgagaatgacctaaagtatcctccctcctgttccaaacactccctattcttccactttccttcttcaacttttcttacaaaatggaatccccttcctgattctggctttggactttaaaactagagatgattaggaaagataatttgaaaagaaatctagatccatagaaaataaatattagtatttgactctatcctttctgccctacacagtggctcttggaaggtcatggtacaggagtaaatggacagaacaaggcgtgtactggctagactctcgccctttttctaaccattggacattggctgcttcccaatgcatgcctaagagtagctcttttctctctccacagcctccgagaccctgaggaggctagtcctagaggctctgattgtagcttccgctctcaacaaccattggaaatcacctgtagggcatagtttaagactctggtataaatatgaaatgcttctcctgggggtgtcttcttagctttttagcaccatctgcctgtatgtcccagaaagaagccatgtagtggccattcttgggtcattcctgctgtttctctggtggagggcatgttaatgtagcagatacttagagatatgttggagaccttggtgttcaggatctgacttgggttcagagctctggatacccctggagtgctccattccatcacactcgtgacttttttcagacttgtaatttcgctattgggatcaagtggttcgtttgtacttctaaaatgctttaaagccactggcctctgtggatgcatttaaatacagtgtgttggctccaatttgctggaaatttcttttcaaaatggttaattgcggtagagtgtaaagtttaagaggatttagggggagtaattaaacgtgcaattaatgaactgtatgatggcttttcctattaatttttacaacccaaatattttttcttgcatatccttttgggccagtgggtctcttcactgttaactaaggcattaaggccatgccctgtttgggagctgggcacttgcccttcctgctggatttgatcatctcacagtaaagatctttaccgaccgccagggctgataacaacatatcccagggtgtcccaagcagccttggaaaacatccatcatgtcctcttccaaattagaatagcatgaaattacaactttgatttagtgctatatttccagggctagaactagtctggtggacagtgagtgtatgcatgttcgtaagtgaataagtgtgtcttagttagggttgtcattgctataatgaaacaccatgaatagaagcaaattggagaggagaatgtttgttcgactcaaatctacaggtaacagcccatcactgagggaagccagggcagaactcagacaggacaggaacacaaacaacacaggagcctggaggcaggaggctatggaggctgcttactggcttgctcacgctgctcccctatagaactcaagaccttccacgcgggcatggcaccacacacaatggtctaggtgctcccccagcaatcaccgactaagaaaatgccctacatgtttgcctacagccccgtctcatggacgcattaacttaattgaggtttgtcctctcggatgactttagcttgtgtcaagctgacatgaaactctccaacatgtagtggctactgatttttcttaatgctttggataggcaagtatactcatgttaaaattaggataaagagttatttttatccatgtagcatttggtcacctagtcagtcatctgtccatcattacaactccatgtaaggtgaacatgatactgacatgcagattagagcccttaaagcaggggttctcaaccttcctaacactgtgatgctttaatacagtttctcatgttgtggtgacccccaaccataaatgtatttattgatactttataactgtagttttgctactgttacaattcataattgaaatatctgacccttgtgagggtcctgacccacaggttgataatggctgccttaaagagaccacactcactcatgcattaaatacagggcaagtaaggagactaaaaccatagcaactaggaaacattgaacctttttgagttttgtgtcatgttttacaacttcaattctagcagatctaacgccctcttttgcctccatgagcctcagggaaacacatgaaggcagcccagccattctaagttcgttgttttactttttaaattttttgagattgtaatgtagttatagtgtttctccctttcctctctccaaaacctccctgtgcctctcctgctctctgataaatgcatggtctctgtgttcattaactgttactgcatgcacatagggtaggaagctcaagaaccccaaagacaaacctatgtgagttcatttctcaccattgtcaatcaggctgcataaatcctgaaactagaaggcaaactgttcattgcaatggtggtagtcatgagtaaattagcctgctgagctgggccaagtgtgccgatgtggaaggagacagtggggaagtgtagagacatgggttaacactaggacttacttcatgtttacttgatctgtgaacctcagtgttttttgaggcagggtttcactgtgtagccctggtactcactttgtagaccaggttggtctcgaactcacagagatatgcctgaccctgaccctgaccctgaccctgaccctgaccctgaccctgaccctgcccaagtgctgggattaacagcatgaggtgctaccacctggccttatctataatttttaaacacttgatttagcggctgaactccttatctctagtgtagattgacagtgccctcatgctttgttcaaaatgattatctttttgtttgaccaaccgtatggtatctatgcaccagaacatgctttcaagtaggagaaataaagtttgatatttatctaaacatctatttccatgatctgtttttgagaattggggctatccgattgacatatacatttataattagtgtgatggtttcagccataactgccccattttagaatggatctcttaccacacattgacttgctctgtagccaagagtgacctctatctcctagaatactgagatttcacacacacatcacatctatgcttgctttatgcagctttgggcatagaatccagtgctgtctgtatgttaggtatgcactccaccagctgagctaaatccccaacccctggctataatcacttaatccttgtcatttaggttttttccctcaacatttttcactattagaactaattaacatctttgtctaaaatgtttgttcctaatgtttattgttcccttctgctataatctttaaagcaaaataactgttaattagtgatagtgttattttaactaagattaaatgaatattccactgggattttgcctggagtttttattcaagtcttaaattaaaagagaatcaacactccttcttatcttcctttctggctgtttctgtttctggttgtttagattctttagaaagagtgacccaagctggcctcacactcagtaaggagcagtggaggactttgaactcctgatccttgtacatctgcctctcaagtgctggaatcatgagagagagccatgcctgcctactgcctttcccttagaagtaattcatgtttctttatttgccactttccggtcatgaagaagttggttggttggttggttggttggttggttggttggtttttgttcttgttttactttgtatattttttatagctggtgttttgtttattgtgtgtgtacagtgataatactaaattatcttctctggttctgtattttattaccttagattttataacataaatataaatctattatttttatgtgatgagacttatcttcttttgaataaacacatacttattatggtatagaataggggtcttagaatgtgtgtgtgtgtgtgtgtgtgtgtgtagggcggttccattaatagtattcaactatgtttttaatttggttttaatgggaatactttggacatttaattttatataatgtttactgttcatttaagataatactgggacatgtaaatgaagtactcttgtatatattgctaagaaaattctaagtgttttatgccaaatgattggttttcatataaacttgctatctaaggagatggaggtcagaagataacaggagaaagccaatttgtcctactttgtgggtcccaggaggcaaattcagatgggcagtcttggtgtcaaaatcctttacctgctgagctatttttatagctttatatctctttgtcttcctctcccactcccctgtgccctatccctccatatcatgcccttcctctctttaatgttctatattatgtttatagtactttgtctggtgagctttacatagcaaaatagaattgtgtttcataagtgcttgaatagcattccaataaaactattttgttcaagagcttttgggaaatacaaaatcttcaataactttcttttaaatttgtttttagaccttgggaagtatttgagtaagagttgtctttcagtgttgtaaagatcccgatggtgctgatgtcagttcagtgtcaccaggctgtggctgtttacattccttagatgcctgctgtcttcttaactttactgttttgttttctattttgctttgtactttctctcatttgtttaagtatatgagaagcctttttattgtccccaaaatgtttttaaattagttattaattctattatgtataaattttaattggtgtgattaaaaaagttttttaaaatgtatttaattttttattctttaatcctttctactgtccaatgttcatccccctactgatctcccccctatcctcgaccactccctgtcccataactcctccccccatctccaagaagaatgtctcaacacccccaccttctccccaccagacctccccactccctgtggcctcaagtctctctcaagggttaggtgcatcttctctcactgaggccagaccaggcagtcctctgctgtataaatgtgtcaggggtctcatatcagctatgtcagtatgttgccttgttggtggctcagggtctgagagatctaggggggtccaggtcagttgagactgctggtcttcccatggggctaccctcctcctcagcttctttcagctttttcccaattcaaccacagggatccctgacttctatctatttgttggttgctagtatctataacatctgactttttcagctgcttgttgggcctctcagagggccgccatgctaggctcctgtctgcaagcacaccacagcatcagtagtagtgtcaggaccctgggcctccccttgagctggatcctaatttgggcctgtcactagacctcctttctctcatgctcttctctatttttgccatttttctcatgcatttctccatttcctgccattccttcagacaggaaaaattctgggccagagcttttgactgtgctatggcaaccccatccctccacttgatatcctgtccctccactggaggtggactctacaagttccctctccccactgtaaagcactttgtccaagcttcccactgtagagtacttcatcaaagctccctccctttgagtcctgagagtctcccacctcccaggtctccagtgcattctaaagcgtcctcccacttcctgccttgggaggttgcctgtttccattctttctgctggccttcagggcttcagtcctgtttctgctcccctaatacctgatcatgttcccccacttcccctccctttccccttctcccacctaggtctctccctctctctgccccctgtgactgctttcttctccctcccaaatgggactgaggcatcttcacttgggtcctttagcttatttaccttcttgagttctggggattgtatcctgggtattctgtacttttttggctaatatccacttattactgagaacataccatttcatgtccttttgggtatgaattacctcactcaggatgatattttctagttccatacatttgccggcaaaactcaggatgtcctcattcttaatagctgagtagtattccattgtataaatgaaccacattttctgtatccgttcttctgttttgggacatctgggttgtttccagcttctggctatcacaaataaggccactacgaacatagtggaacatgtgcccctgtgacatggtggggcatcttttgggtatatgcccaagagtggtgtagctggtcttcaggtagatctatttccaaatttccaaggaacgtccagatctatttccagagcagttttaccagtttgcaatcccaccagcaagggagaaattttcttccgctggaccttttccttctttacagtattatattaacattagttatatatgtatacatatatatttacatgtatccatgtatacacacacgtagcctgctgagtccctagagtgttgctcatgggtatgtttttgggctaaccacttggtatgagattgccagttagagagcttattcatagagaaactctccctctctcagcagtcagtaacttcctgtagttcttcatgtaggggtggggtccatgaagcttccccatccacatgtgcataaccactgatgctgtcagcattctcttcttgtttaggcagctgtactgctgagagagttcatagatacgtctttccttgtaccatgaaagacaatcacatagcagagatactggtccactatgtcctcagtatcttcagagagttaaaccttttattgtatatcttttgtctccttccttaagtttatttctagtcatttgtttttctctgacgatattgtgaattggagtgatcccatgatatctttctcatcatgcttgttgatgatgcttagaagggctactgattcttgtttgagttgagtttgtattctgatcctttgatcaaattgctgatcatttctagaagttccctggcagaatttttgggatcttttatgcataatatcatatgactagcaaataagaatgatgtgacttcttttcctatttttatccctttaatatccttttcttgtcttaattgctagaggtggttgaaaaagaatgaggatgatgattggcctggtctcagtcctgatttacttcagatttttcaccatttaggataatgttgacagtgggcttgtcatatatactctgttattctgaggtgtattccctctagtcctgctttctcttaagacatcacctttgatttttgctaaaatgttttctacatctgttgaggtaactgtttgatttttgccattaagtccacctatatgattcattacatttattgatttatgtatgttgtaccatcatccatccctctatctactggataaagccaacttgaccatagtggatggtctttttaaaaatggtatgcctatattctctacaagtatttttttttttagttttttctcttttaagatttattatttttatatatgtgagtgcattgtcactgtcttcagacataccagaagagagcatcacataccattacaggtgattgtgagcaaccatgtggtttttggttcctctggaagagcagtcagtgctcttaactgctgagccatctctccagcttctgtgcaagtattattaaatttatcttcatcagtgatactgatctgtggtagttggttttttgttgtgatttttaagaccaagtctctctagatagccctggctttcctggaatttactatatagaccagggtgtcctggaacttagagagatctaagtatctctgcctcctcagagctgggattaaagacgtgttaccaggtccacattgcagaattttttcgctttgaattttgaaagtgttccttctatttctttcttcttaaaaaataatttaaaaagtatggttgtaaatcttttttaagtagtagaattttgttatgactctctctaagattttttttatttgttttgttttgtcttagaagacagtgtttcaatttccttatttgttatgggtctgtttaggttgctgaccttttctgggtttaactttgaggattaggatgcatctagaaccatacatttcctttaggttgttctgactggaatgtaggtgtttaaaggatccccttatcatattctgtagttctttaattcctgttgtagtgttccctaattcgtctgatccagttatttgggtctttcttttaattaatagagccaaaggtctgtcccagagcacaggttgtttaggccaggataggtctggaaattggatagatgcagatgaggaaaggtctatacaggtgtacttagctggcgggattggcacagacgtttcttcctggggccgagcctgccgtttgggaattgtgcatgcaagacttatcagactgggctggaacacaggatgaccaggcagaaatggcctggaagttggatatagtgcagcccagataaggtcagccagatgccaggggctgggatgacacaaaggatgtggtccaattcctttttaaataattaggtgcacttaaagatactcatataaaacttatttcatttcagacccatagagacatttctttgatatttcaagatagcccagagttgaaatttatagttcttagggtttatttagtagggaagcctccccccctttcatataagtatttctttaaccttgctttcacataggccttgttctaagctctggaggtatatcactgagcaaagcagccaagagccatgtccttgtaaaggtgctctccagtaaaggtgcagggtgccatgctgagagcatccagttaacacagggtttggtaccataaactatatgctcgactctggcctgtgggcatggatccattcagctaatctactcagtagctctcacccagagtttaagtaccttgatctagtttcattgccaataagtaagggagccaattggcttctcaataaccatgtcaacaaggacacttgccttgttacagcccaagacgtggcaatgctgtagttaatgttgcaaagtttgtgtctgttttatggcttcatcttttccctagggatttaaatattttattgaagttttatgttgtgattgtgtgtatgtgtgatgtatgtattcacttctctgaatcttctgtagaagaggcagagtagagtaccagcataaaacattgtggtatctatccactgaccttcttataactgttcatgttcccgctgtccatgctgactctttcatctgtgccttctgtcataaattgagccacatatggcgaatctcatgtccttgcgctccttgtagtcatccttttttcagtggccgttaatgtatttgggttttctttgccttgttaaatattaccttgttcaaacagtcatatttctatcaagaggaaataagtataatttgttcctccactggagtccttttactctaaattgtagtgtttagcacctcccatttattctcattaaagtgccaacctgtttgttattgtaacagtctctctcattttgttttctactgaaaagaaattcccaagatttagagttgtttgctgtcaggaaggctggcctggcctgaccaggtttgagtcattttcttatgaatgaattgtgtgtgtgtgtgtgtgtgtgtgtgtgttaccagtttttctcatttgtgcatgttggctactaaaaatataaaataaaataaaataaaataaaataaaataaaatgcacaaacagagaaatactctttttattcttaacaaaatttagttttaccctagaaattcatttgcttcttgttttgtgtttttggatgggggcgattttaagttctgtctatttattacttttgttatgtaatcgcttctctgaagtatttctattttgtagccaataggaaaaactacattaagaataacctgagtcaatattgttgagaaatgtttatttctttatgaagcgaactttttccaagtgttttcttctgggcacagttctgcacagttgctgctggaggccagctggggaggaacgctagctaggttgaggcaagcacttgctgcaggagtgcatgcagcgctctctgggctggggctcctctgagtgagtgtggtgagccctgccctgttacccacagaatcctatttttattattatgtggtaatattatctgaacttgtttgaaaggaaccattttctttttattattattattatggttctattccccctctcctggaaattgttgggtgtttttttttttttcttttgttttcctcctcctttcatgatttctgtgccagtctttatcactttgacagaatgcctgaggaagaaggatttctttggctccttgataaaaggtttcactgccgagtcagctggctgcatggctgtgggcctaattcaaggctgatagatcaccacagaaggacactgttttcctccgggcagcaggaagtacagggtagggactctagaatcactgccttagggcatgctggacatgacctactgtttccaaggtccccacactcaagttcctatcactgcccaacattcccatgagaattttgaatcactattagatcaatcccgagattcagtaacagtcttcatgaccccatccatttgccagaaactccacccctggacatttcagaggcaatagaaggtttcacacatggctttggggtaacattgtcaatccaaattgaggctatgaagttcaagtcttgctaatggtaccttggtttggtttccttgatcccagctgtttctgatggtatgtgtttatccgtagccttcttcctcctgcaacctgtttcctgctactttctacttcagtgtaggaatggtttgggtttagagttttaaacaacttttattaactcgttgagaattttattcagtgtattttgaacatttacacccttcctgatttctaccataactaccctcacattcttttctacccagctttaaggtatcttttctttcttttcttttccctcaagtccatattgtgttgcccaactattcttgggactggggccctccctcctatatgatagatgtaccaaaggtcatattaaataaaactgactcaccctctctaacagctttcaagagtcagctgctctgccaatggtgggatatttttccccttctcaccgcctccatgttgacaatttggctggattttcaaggttttgcaagagctctcacgatcaatattcttgactccatataaaattgacatttattcatttgcatatgttgaatatccccacgttacttggataaagccaactttgtcatggttggtgaaggatctttttcatgtgttttgttaactcaggttgcaagtattttatgagaaattttacatgtatattcaccagggaaattggtctgtaattttcttcctttaaaaaaaaaaagtctctttatctggctttggtaccagcataatactggcttcataaaaaaaaaaaaaaaaaggagcattttctctaaagatctggtatagctctgcattaaatcctagagttttggggttttttttttttaacatggaaaaaaatactagtattcattcgctcagtcctattgagtttgcattatttgtctcatcctggtttaactttggtaggtcaggtacatcctatgattgatctgttgctcttagactttctagtttacttaaatgtaatttttataaggactgtctccatgaatttctgaattttattggtatctattgttatggctcctttttttatccctaattttattaattagggtcttttaagtttagtgagttttgtcatttttatttaccttttcaatgaccttgactgttttaccccatatgttatggttttcattgtcctttaattgtaaggatagttttgacttcctcttagttgttcacccatgactcttgttatttaatctccatgagtttgtgtcctttctgtagtttttcttgctattgattccattgtggtcaagtagaatagtaaaaattaaatttcaattttccaatgtttgttgatttttgctttatttccacatatgtgttctattttagagaaagtcctgtgggaagctaagaagaatgtattttgtccttttgggtagaatatactgtaagtgtttgttaggaccatatgatctgtgatatattttagtcagagtggcctatttattggtgacagtgatgggatgtattagtcacccaatattaacttatgtggttaatctgtgactttatatctagcaatacttgttttatgaaactgggtatacccctgtttgatgtgtgcatacatgtttagaattgtaccatcttgaaggcttgctccctcgatcagaatgacttgactgtgtctctttgactagttttgatttgaagtttattttgtcaggttttgggatcatgtcatttgcttgtttcctggtttgatttgccgggaatgtcattttcttttcatctttgaggatgagtcttgcttgatgcaacaaataaatagtttgtgctttgtaatctcgccttctagtctgtatgtttaattttataaattttatttctacttttgtgtatgcacacatgcatgtacatgtatgtacatctaagggtagggcagacaaatatgccacaatgtacatgcaatgtcagaggacctagtgagccatctcaccagttcagtctgtctttagagttggcagtttagaccatcaatattaattggtattgaaaggtgtgtatttattggtgtgtgtgtgtgtgtgtgtgtgtgtctgtatatggttcggtattttcctcttctgcttaagtacttactattctgtggtattttattcttctatggtctattaaatgtgcttatatttatcattaaaagtattcctttcagtctcctctagagctgccatagtggtgatgaaatttctttagccatcttttatcatgcaaagtttttctttgtcctcagctatgatggatagaatagtacggataggtacctctgttccttcagaatttgaaatacaagttctgagcctttcttggtgctaattttcttttgagaaatcagttattttttctgagaagccagcttttcacacattacttactggtgttctcttgctgcaatgcagctttcaatgcactctctgtgtgccctgaagttagcattttaacggtaatataaggagaggtttttttctagtcctatgaatttagtgtgtgctgatatacatctcttcacccatatatgagacatttttcccatttatgaaaatgtcttctgtaccattgtcatgaaatcattctctttgtggtttcataatttgtaaatctgacttttttcatagtgttcaaaaatctttgtgttctgtttgcacgtgtatttatctttgttcttgattgaatattcccttttctctgccatgacttgtgaagccctgtcttccttataacccattctgttggcaaggctttctactaaggtgttaaagtggcttttaaatttttcattcagtttcagttttgtttgtgtccggtatctttgcctctatttaaatccattctcatacctcccgtcactgcatcacggccataggtcactcaactgttggtttttcttgggagtctttcaggagttatttctgttttctttgcacatattaacaatcattcttttctattctttgtaaggaatttaatctgagtcactctccctgggagccatagctgtgggattggaattgggaggtgtcttactttgctttcttatggtacttgtgttgtctccacgtcaggatttgcatgccttaagtcaggtcactgattgaatttactttttaagtggactttcctctttcatcagaaatgtttgcaatgctctggagtaggtaggctgcacagtaagttgtggtgttcttacctcattccaaaaaaataaaacattctaccactgttactatatagttctcagtccattacaaaataaagcaataaccaactgaaaaccagtcaaacccatgatgtacattttgttggcaaattgccaagggctatgtgagttcttttgacagcagaaccagggagctaggatatcctcttttatctcagactcaaagcatgattatgtcgagggatctagaacccctgtcctggctcagcctggccccctggatctgtaacaggaagaaggaaaaacaacatcagctgtagtgaaaaccatgtccttgaaaacaaccaggaagtaaatcttttccagcagaggtttctatggtttgtttcatggtataaaaatgtgtacagtgggaacaagaagctgggagctcatctattgtgtggccctccactgggccctggtctttcagtcaacagctctagcagaactgtttgattccctaattggtttctgctggctatttgtaaacctctaattagatgatggttttgttttttttttttttttactgaattttttttttattttttttattttttattttttttattttaattaggtattttcctcatttacattttcaatgctatcccaaaggtgatgttttgttatcttgtctggtgctactgtctgctactgacgtttgttcttttacctttgcttgctaggtatctgatactcatgtattcaaaatgaaaggcatggctcctgtaaaacattcttttgaccattcggaacaatactataggtaccagtcagtttgatggtactagatgtattgatatattagttaactgtgggtcttcataaacaatgaaaggggtctgggagcagagtaccgactggtgattaatattgggttagtagaaagtatgtgggcaaatgtaaatagaagggaaacagtgggagctagaaggaagggccagagaaaagtacgtattgtgtgtgatgattagttttctcaactggccacaatctagaatcacttgagaagagagtctcagtgcagctttctagaccagcatcaactttggctatgtccaggggattgtcttgattatgttaattgatgtgggaagacccaacctgagagttaaccacaccattgcctcggtttgggttttgaatggtgtagtagtaaaagcggtggactaagcagtgatgatgtgtgcctgcatccctttctctaagctcttgacttggatgcagtgtagccttggatgcaaatataactctttcaagtttctgccttgactttatgagccgaagatgctcacccttaaagctactttttctttactattttatcatagcaacagagaggaaactaaaacaccattacataaacaccataggacagtcccatctctcagggatgaggcacggagaaccttgaaactcatctagcctgtgttctttggaagaaaaaaaacaagaaagtgagagaagaaagattaaggaggaagaaagattatttggtctgaacagagcaagatggaaccagccagctaaggtggtattggttactaaacaaaggacgaaaagaggtgcaggggaaagaacaaaatgggaggaaaagtactgtatagaaactggccagcctgattgctggactcagcctcagggatctctggaatacgctcctagtttctagaagcctgttttattccggacagctctgcagtagccagtgctcccctcctaaagataagcctacttgtgtataagtgggttacagatcctggaccagtttgtggctgagtccccagagatggcatcactcatgctggtcgcactccattcctttaaggttctagttgtggaggttggtcctgtccctgttcagatctttccttctttcccatatcccaggtgtcacttcaaacctccatgaaagtaaggttttctgtttgataaaccctctgcagatctatttcaatgttccattttcttgctgtagcaagaccttgtgtccagtaatagttctctgccaattgcttcaggcttgctgagagagtgggtctcaggtctaagactgcagacctcagattgagcaggggagctcctggcagtagagacttacttctgccctgtggcttgccaggtggaaagggctttatagccagtgtctcctgctagcactgtaagtgacccaaatatgggctttcccacaggtgtttagagtgtctcttaatattctaatactgtcttcaactatgccaggattattacctggaacctctggatgattgtgcctgcatgtcatccttttcttttctttatacttttactgtctatagttccacatcaattgataataatgtcctcatgaaatcacatgtaatccaaagtgaagaatgtacttgtctgttttcttcaacaagaagcactacctgcataaatagtatctttcatgattatctaagtataaatgtagaaaacgtagcaaaatacacatattcaccttattccaaagagactagaaagttatgtggggaaatgtatctaaatcaatagtgaaggaggttggcatgaaaaaaataagcaaagagaaacaaaataattgaaagtcttggctcttactgtttacttcttttatgtatcagagaagtgctttgactgttggtatccaagactgatgaatagtttgttgactgatgtattcattgaagtaaaagtattcactgccgaagcattaaataactgtatgagtttaatctcttctatgccaatattacgttaaggctatccaaaattcaagccaatgaagttaagttgtcctttgaaataccacgattcattattttcctttcttcctaagagcaacacattttatagtttatggtctgatgagaggcattagagatcaaaatgaaatttatttttgagacactaaagaaggtaaaattatttaacacgtggctgtggaataggacctaataatatttcattagcaatttcttttgacagaacttacaccctgccatattgagaagcagctatttacagcacatcttaaatcttttcaatgggttttacaaatctttctaggtaagaaacataaacgctttcttgacaaatatgtttaaaggacatagtgtcctttgagatacacttgacagattttcacctctgctgtgaatacctccgaagaaatgcagtggaggagatcctccaggagcactgacgcgttgtcagcgttctctagcaaagaaatgtagagcatgttactaagtcacattctccatccgtgctgttttagggaacacaacttcataggcacctactctgtaggtataaaggctgggagtaccagggtagtgagatgcagatcctagaaccaggaatccccccctgtaaaagaggtcaaatctatgcacatgcaaacacttgcagaatatggagcaggccattgctggggaaattgtgatactcaaagtaaggacgtggtgttgagctggattgctcttagtcactcattcttgctgagtctctgtttcgctgtgtatgtctttcaactttgcaaagagcagtggtgacctgatcttttgtgtactaaaataatccttggcttctttcagccttaccaatggtattcactttaataaaagtggactctgacaaatccccatgttaacaggcaaaccaagtgtgaaagtgtcagtctataaagttggtaaagctcctacatttaagaatatgtcagaaatttacatttaagaaattgttaatttctttctatatctgatattaaagaaggaaaatgcagctgaactatccagatgtgtcaggtgtctttatcactttctagccctatagccatggatgctttttttttgagagagagagagagagagagagagagagagagagagagagagagagagacctttattagaaaatatttttgtgtagacagaaaaggaaatcagtgaatccagccctgcttacagctaagaatacaacagcatctctcccagcaatgtcattcttgtttgaagaaaggacttccactacatggcttcatggacttgcactggaactcgaagaagatccatgaagcactcttcggaaggctctgttcccttgccacacttgccacatatggatgcatcaaatcacaccagaacaagatgtggtctcactaagaaattaagctaataatatcacattacctccctctcaggattccccaagcatgcataaatgcagaaagcctacagtagaatattacaggagagcctgtccaaggccccagagcaagttgccttaccttccttgtaccatattatatatacatcttacagttatgccagcgtttaaagcattgtcatgctgcattataaagtgttttttatgtttaggattaggaaactgtctttcactctccctttggctccttttatgtcctacaggcaaatcctttctcgtaggtcaggaatgtaataaggtaggttttcctctctggggtattgtgtctgtcttactgtgtttaaattgatgcacaaagctctttggagcaaaagacagtattttctttgtatagaagccagtggttcactagcccatggggattctccgtgttgaggattttaaagatacagtttacactgggtggagatgctggtgctctgcaaggtctccagggaggagagttggtcctagccctaggaatggaggtcttttctctgtgctgtcttgaagaaaaagcaaataaccgacaactttaaagaaagaggaaaacattcaaagatgttaccaagctctttttaagagtgatggttcagaaacagtaaagagaaattacaatataaatcatatatatatatatatatatatatatatatatatatatatatagtgtatgtatgtacacacacacactctagaacacagtcattggacctccaacctaatgacctaacatgattgatttcccaagcccacttctctcaacttgataatcacacttaatatttcactccccttaatatcaatgaaatatgacctagaggattaaactcctacaagagtaggaggagtctgtaaatcatacttttattaaaaaaaaatcaaggtcctctcatggaggctacaattaataaaagaatgtaagaatgagttaaaaaagaggtttgagtaaaatttctaaaagaacagccccaaaatagacaagctgtaaattgtggctgctacgtggtggatgagaggaggaaggaaactgatagagtttgagttaagctagcatgaaactcggccgcatggtgaggagaagagcatcacagatgtggtaaggaagcacagactaccaggcaaagctgctacctgggctctggccaacatccaaaagaaaaatacagaagacacaaaaaggacaaggttacaactgagtctcagcaggtttgagaggaaaagtgcattatttccttaaagagatgatggtcccttctctgtcttttgcatgtataaatcgaacccacctttcattttttattaagtaattaatttgtgtatttacatcccagacgctgcccccttccaatcaaccttcacataaaccctctcctcgatccccctccccttcaatatccccccaccctgtcccatcaatctgcaggattaggctacatgcatgccagggaccatagtccagcctctgtatgctccttgattggctcagtccctgagagctctcaggaattagattagttgacactgttagtcttcctgtgaggtacaaacctgcctttctaagagatgtttgttgttgtttatttgattggttggttggatggttggttagctagtttttgactaagtgattgaccagatcaactagattaactcttatgggaggaggggaaacctgcatgtctccccagaggtagattctgttcttttggctaggaagcaatggcttcgtcttaatggacttccattgttactgtaaaataatgaaatcatagcaagcacctttctctttcccttgctccttttcatcctttatagttacattgttgccttctttttgtctatacatatatatacatatatatgtatatatgtgtatatatatatatatatatatatatatttccccccataggtcagtgaaagaaacaaaggatagtttcaaattctagagaaccctttggctcaagtgagcagactacactttccgcacactctcatgtctgtggggagagagagagagagtttaggactgggctctgtgccagaagctcaccctgtacactaccagtaactttctcaacttgtctcctgtgggaggtaagaaatgaagaggaagcaaccagggaaagactgtcagtgtaacctacatgccagctccctagaaactgagatgaaaaagcaatggtaagaatgactacgaatcggctgccatactcccatggcctgtacagctgatgggcatccatcattgcgggtaggaagggcctagataccagagggctggcagccaggttgctgcctttctatggcagaatattttcttaatgactgtattatgtttgtgctatgtgataaatgaaataatggagaggatagtttgtaatctaaattaagattaaaaaaacaatgataaaagattatgtcctataagattcaagcaaccaagttcagttgtctcttatctggtttattttgtaatgcacttactagagaacattgtaattcaccaatatcaaaccacatcttattaattttctgtttgcgtgcaatgtggagaccattatggaagccgtctatattttgaatgcatgtgcttgaagggtcaaagaaaagactccagtgaaagttttagaacgtcgaatgctttactagccaaatgttcctatgaaaatatgcttgtaaaagtaagttttatgggaacattctccaaactagaaacatatttctaggaataaatggggatggacttcttattttgttgacgaggtgattgcaaaataaaatgaaacaaaaacaggaatggctgcaaatgaagaagtcagctaaccttgggaatgtccctgctacatgagggttgaaatgacgagctccaggcaggccgccttgccagttctccggggtaaaccaccactctgcacagcccacagccttcactattttttttttcttttttccgatttccaagtttcagccttggccatttgcagctacagcgttcctatgtaaagcactttactcttctatttctccaatggaaatttatgtgaccaaccttacttcctgatttctctttcttcaaacactttagttatggtgaggcaaaatttccatgacattaatgagatttccacaagcaaattaaagagaaaaatatgccctttggtcttttgtatttaacagtactgcaaggagaagaagtcttggagtaaagcgtgagccggagcaatagccaggggacaatgccagggtagcttcatgcaaggaactaggcttttttctctcctccatctaaagcttttaaattatttcaagacaaacttactataaaacatcagataatttgctctctgctgccagctgagcataattctaacagtacagattgccacttcatttcaaagtccttaacttcaaatcatgttaacattactttactgggcaaaaaataaattttagcattcttttcattggtaacaaatgggaactaagtaaggcacgcaaattgtgtctttctgaatcaaagattttattctacacttgcaatgctaaaggtggcttttatgggaagggcctaagggtgtctcttatggaagccttcagattgttgagaggaggacaatcacaagagattgttttcctttctctggcttctggatccccagcatacaactctaaggcaaaacagactggagtgctagggctggggccacgtttgttccaacagcacagcacattcctaaagcaaatagtgacctggtttttgctatgtgctagatattgtttcagacacccttgttcttcattttggttatcagatgatagaaacactgtaccccaataaattagaataaataataaattagtgtcctcaggaatctcacattaagaagaaaaaaaagcataaagtctgggccaaccagaaaacaaagagtattccaagttgtcagacaagtatgctgaagggtaaaacagaaacacatatggatcagtggtggataggaccttattcactagaacctgtttagttgatcagtctaactgtggccttctacataaatgttcatctcaagtcaagacctgaaggtagactcaactcatggatcacagtacttttttccctcttcccagagtggccatatgaagtaaatcttctttttctgcctttcctacttaatttggctcttgcaattggcttgctgagagcaggtggcggaacctggcttgttggtatataagtcgtggccctgaatttcgtagcagttggaatacatcatttaaacaaaacagctagatttttttttttattatttacaaaatccacattctggtaagggtcagcagtgtaataagtattaagttcattgagtaaatcaagctgtaatgcgttacaagttatagagaccgttggtaaatagagagcagagtaggattggactgcagtggagtaatcagaaccagaatcaagtatgagaagtctgctaagagtatttgtttacctgggacctgagtgtcctagagtagtcgtcacctctacagcttcccctatgctacctcagtagcaaatacatgcacactcagatgcacactcacaggcgcacactcacagtcactactcttgacatcacttttcactatactcttgatgaccttgagcctctatctctaatcctttcttctataaaggtgttttgtaacctgtgagtcttaatccctttgagggtcacataccaggttccctgaacatcagatatttacattatgattcacaacagtaggaaaattatagttatgaagtagcaacaaaatgatttcatggttggggtctccagaacatcaggaactgcattaaaggctcgaagcattaggaaagctgagaaccactgctctgtgatgttcttctctgtttgctctggattcatctcagttgtgtaaccttcctttcttccttcttggtttgtttgttcgtttgtctgttgtttttagcacatttcccattttattttatttgttcctacatgtttcaagtattaccttctcagaaaaaaaaaaaaatgcttcgctcacttttattatccacaggacagtttgtatatatagactgtattagttagggttctttagagtcacagaacttatggatagtctctatatagtaaaggaatttattgataacttacagtctgcagtccaattcccaacaatggttcagtgaatggctgtgaattgaagtccaaagatctagcagttactcagtcccacacagcaagcaggcgagggagcaagagctagactcccttcttccaatgtccttatattgtctccagcagaaggtatagcccagatcaaaggtgtgttccaccacacaccttttaatcccagatgaccttgaactcggagatttaatcttctggaatccatagccactatgcctcaagatctccataccaagatccagatcagaaacttctatctccaagcctccagataagggtcactggtgagccttccaattctggattgtagttcattccaaatatagtcaagttgacaaccaggaatagccactacatagactaatggctaaacttgcattcttcctgtaaacgtctatgaaggtggcacttaatagtacataaggaatgttataagtcttcctgtatatagcagcactaacagattgaaacattcaagagaagcactgctcacgagggtggctggtgactgagaaaatgcttaggttaatatctctccatggtggaaagcatctgtggcacagtgtcccgcgggctccccaacctcttgatttaatgatatgaacctgagtagccccgctcagtgagcatactcatttctcatgggaggaggctagggaagagggaagaagccctctgagcaaaggctgatttttagacagtatccctgcctgtgtctcagaggccagtttctgagatgcattggacatgtcctatgtcatcatgccacttcagtacttagcaaataactgtcgtgcctcaaataaacctggagtgagtagtaaaaactgagtcaacacagtgggaaagatgggcaggtttcaaatggatttccctgattttgtgtctcctttccttcctactttttatgagactgtcagcagtcactttcagcctcctgtacacacatacatacacccacttatttaatctcttattaactaatgaatgttgtcccagtaatttgtcatgtaagactctgttttagcaatgcaattggcagaatatcatccatggatatagctcagtgtctaagagtacttgctgagtttaaatccacagtacccatttgaaaagccagttattgctacatgtgcccataactgcagaattggtatggacgggtggataccaggtgctggctggccagccggccctacccaaggaagaccctttcagagcaatagagaataagaccagtgtccgttggtttccagatccctgcagaggcactcactttgccccctctctcctaccccctctcactctttcacctctctcatgcatgtacaccaccccccaaaagggaaacattcttgacttttcctaaactattagatgaaaattatctaaatctttttgaaacctaaatgtttttagacctagtgcaatttgagcaaatgttttcatgaccagactctgatatcaaacatttgatttgggatgacagctcaagggctggtggttatgatattcagaatcagaaatgagtactgaggaagcctggctttctgatacagtggagaaaagcacctgcctgttaaaagctggatctcagtttttcccattcatgttaactcgttatttttcttgtaatcatactctgtgttatccctcctacaaggggcagtgcctagctccatttagattcctgggatcatgaagtaattaacggttaagattttattatggttagacaatgagaatcctagatcttgcatttcaaaaagaaatagttcatatttattttgttattcaagagggaggcataatatatgaattttctccatccttagagctggtgagggagagtaaaacactttaaaattataaatccaaggagtgctactataaatatttaataactttccaactttctaaattgtaaaataaagtaagaattatttcagtaggtggatctgtacagaagccatatataaagaatatccagtcaccatacctgttgctgaacaaaagcacatagaatgggatgattttggtaccccgggacactgtcatgcttctgaaaatccaatgtaggtgtacccacagtgtccagttttggtaatattttctagacatgctggatttctgggcacgtctgggcattcaaaagtacatgatgaattatttcagtctctgggagaggccggattctatggccgttttgctggccactttcagtctcatgaagctgagctgagaaggctctgggatgcagacaggcagccttccctgcacctgtaatacagctgtagaacagggtggaaaccctgcacctgctgggtttgtgcactgcaaacacacgaaataggtgagccttttagaaaataaatgttctacattatttatcatttccatgatggcacaattcatactatcttcttcctctggaatagtgttctttcccatctcattggtagagttcaagaacctaatcaattgtttccatctaagccctgtctgtctttgttggcgtagttaggtccataccgcttctgcttttagagttagaggtcttgtcatctttgcgacaacagagactagggtgttatgtcagtacatgaacccaggacctcacagagattacatcaaatgtctagataatacctgttggcatctgaatactggtacttccagaatagaaactgaaagctgcttgttttctttttcaaaattattgttgttttgtgatacattctaactgtgtaacccaagatgaccccaaacttccaatcctcctgtctcagccttccaggagctggaattacagtttctctccaccatgcctggataagaaattgaaatttttttgtaaaatgtcctccatattaaactgtaagcaaacacttgctaggcaagcgagcgctttttaagtgtatttcagaacttcagcaggggattcactgccttagaggagtcccttagtggactgtcaggagccagatgtactctttgccaacttttattaaacagtgttcgtagtcaggcttttgttgttttgttttatgagtgcttttgtttgttttgctttgtgcgagtttgttttttctgcttctaaaactaccatttgtgtgcaacctggtggtacagttcctgctaattaaaaggctggtgggggaaaaaaaaatcacaaatccagtaccaggcctggcaactcagcaggaagcagaccggtgtgtggttgggtttgggcttggttttggtttaggcttcagagaggaagcggagcatgatgagcgagcaccggtgcagcctatgtgaggcctccctacagtccatcgccactaaaattagctaaaattagcttatccttattcaactattattctacttgaatctcagccgtattagcatgtgggtaggatgaagtagaaaacttctattacttcccgagttgatcctatcttggacagttcataaggtataacagcaagcaaggattcgggcatctaaacccccggcgctgccatgctgtttggcacagagggaatagaattttcctgatcatgccttatttcccattcccttcctggcctggagtgaaagttagtttgtgatgtttctgatttggttttgttaacaactcaagttttaaatttctttcctccgtttttttttcaccccactcactttttaccacctgaaagacaagacatgaaataagaataaataagcaataaaatcaatcaatagagtagtatgattcccatgcagtttccagattgttcactttcagtactttatgaaattaaccagaaagtactgtcttcaaaaatgttgtctttcagctcagcctactggagagagggagatgaggcgggataagagtgtgcacatggagccttgagcgtatgttgaggattgcttgtaaaatcccatctctgtctctacagaagagaagcccccccccccccgggaggttacataccacctacctcctccttctccttcttttactttttctgtttccccacatcgtcctcagattccactacagagcaggttttcctgatatttttttccctttgtatataagtgtgtgatatctttgagatataattcacatactgtataatttaaagcatatagcaatttagtatatcgaatacattttaccaaaccatagccctcaattatcattctcagttctctccatgtatcctacccacaggaaaccacctgctttctttctgtatagatttacctagcctggaggttgtggaattaccacacagtttgtactttgctccatggctccattcacacagaaggattccagtgttcatccacatagtaacaggtcccagagtcttgctcttttttgtctaatttatttttacctgtgaaggataatggggtttttttgttgttgttgttttgttttgttttgttttacttccatggacctgtgcccagcttacctcagtgttagtttgcagggagtgggtgggatttgtattttaatcccatgcatttccatcttaatgcagaagccctcactcatagataatgtttgccttgtccttgttaacagaatttactttttccccataacagaaacaattgtgttgcttaattgtgtcaggtgcctgtcaatggggattcgtttattcatttctaaccaagtcctggcttctcaggagccccctaatgcttcatgtccccagagcaggaatcagaaattagtctttactttaagaagtgctgtttctaagttcttactgttttcctgtttttatggcgtgtcagacagctacagatgagtcagaaatatcattaaccagctggagctgcagcagtctgtctgtgaagtctctggagaaggcccctcccacagcaagctatagctttttaaataatctgtttgaaagattgacaggtgccacaaaaacaatttaaattattttgtttatctgaaattaaagtgcatattgatatataaggcctatttcagccctgatagttggtgatttgcaccgtttttctatttctgctccctaatgctttaaggaatccaatcacagtgtgtccctagcataatccatgccatgacagtcatggaacttttcagaaatactgcttatcaagcaatacacacaagaagatgtcagcccagctcagatgaaaagtgggaggaattctgggggaatttggttttcttttaggtaaatcatttctctccctctcccaaatgtgttttattatgaattaaactttaatgaagtctaaatcactttctcacgtccctcctttttacaaatgtctctgggaacccaaatcaaggtagccaaagtgtgtacagtagataaaaccgggcagagggagcaagtcccagccagagcaagagaatagagtctgagagccatatatgcccatggctcaccaccactttcttaggtgtttatacatgaaacactactgtgttcccttctctatcacatctataatactgtgtgtgtgtgtgtgtgtgtgtgtgtgtgtgtgtgtgtgtgtgtgtaagagagagagaggcagagacagagagatagaatatcacgtaaacttggcagtattctaaggaccatattttcttgctttcgggtgtaccttatactgtgacaacacatatgggaatatttgaaattgctgggaatgctgtgttattttggaaacaggtggagacaggaaactctgctattttactagcagagtaaataaatgaaaaggcagagtggtactggccaatgtttgaagggttcaaggtctgcatgtcctactgtgactgcttttggatatgcttaaccgagacttttcatgacagccttgggaggaatcgctctctgctgtcaggatcctgctgactagagaaaacaggcttgggaagcagccagtgtttgtctactgatatgcgagtcaccttgggcggtaggtggcaggagtgaatttctgcccagttctgaagagtgctgtaacttctcctctcagggagttcctgagaactgagcctacttatctagagagctgtgctttccaagtggaaattgaatctgaccaaaggaaggggggagggtgcagaacaaaagcaagaggtacctccaggcttccccaactgattgaatagctgctctatgtaaggctgtgtgagtgcccactgtggctaagccacatgtttgttacagctgaaggttaggaaaactgcctgctctgaacttactcacataatgaagcacgaagaaaggacggtgattagctcagtgaagtccattgtaggcttccattctactgctgctagtgaaaagaaaagcttccctttcctttcccttcaggtctctcttctgcccttctccaagtctccttggttcacaattgggccagagctgcccaaagagaattcctcgaaataaagaggtgccttccactttccccagtggcaagtaagctattgaattctcctgcctttctctaggctctcacagactagggtgagtggcaaagatggaattatggcccttggctcattctgctaaaggcttgatcatagttggtgactatccaaccttagtttgatcattatgccggttatggtaatatcatcaattatcatatcctaagccagatgaagttccaactggaagtccagtccttggacttagcctttgttggaaatgtgctggtcccagtgtcccctgtttattcaaacagggagcatttagagtgtctcacacacacggcattgtaatttataccatctatctctttccggttcttgggcctctggcaaattacatgtcgaagtgttggattagtttagaatttaatcatgcattattttcccttcaattaaattatttatatatttgattaacattgtcactgttaggaagtcaaattttcagtgaaaaccacaaataaactcacagtcattgaatttcaggccagcttcacttagaaatcagtctgtctgttcagtgtcaattgtctattcattgtgtgttgtctcagtgagcttggattttagtaagagaaatgagtgcactctttgaccttcaggtagaacaatacatacagcaaagtgtggctgaactccctcactttcttggagactttttgccctagcaacctggtttttattcctttctagattcttttctttagcatgaaaacctacctccatctacttgtactattttatgtttgagtacaagaaggaagccctgtaatcatttcagctggaggcaagacaatgatgggcctataggtcagatccaaactactgcctggtttgggggcttttggtgtgtgtgtgtctgtgtgtgtgtagcccttgagctgagcccatcagttaagtatcatttttatgcctttaaataactgaaaataaaatgctaagaaatattttttggcctgtgagaatttctgacatccataagtaagtagctcattttctcattgacactgagtctacagcagggtacagggatgctttgacagcagaatctggtttataaataaaagcttgctaaccctgtgtgtgtgagtgagtgtgtgtgtgtgtgtgtgtgagtgtgtgtctgtgagtgtgtgtgtctgtgagtgtgtgtgagtgtgtgtgtgtgtgtgtgagtgtgtgtgtgtgtgtgggagagtgtgtgtgagtgtgtgtgtgtgtgtgagagagtgtgtgtgtgagtgtgtgtgagtgtgtgtgtgtgtgagtgtgtgtgtgtgtgagtgtgtgtgtgtgtgagtgtgtgtgagtgtgtgtgagtgtgtgtgtgtgtgtgtgtgtgtgtgtgtgtgtgtgtctatccttcggagtgttcaactaacctataggcacagcaaccaaacagttattttaaaggcaagtaactatttaaaacttacaaccccatgaggcttgtgatttcttagaatcttaatttataagtaattcctggatcttaaaaaacgttccctttcatgttaaacacacttgaatgtcctacagagtccaataggtacctctatttccttatggtaacagactacagcatctgagaagctctgttcacttctgctttagatcatcgaagttccttcacagaaagataatcttgcatacatgcccccatgtatgcatgcccccatgtgcgtgctcacaagtgtgagcgtaatcactgtttgaatttaagagaagtttcaggaaaattctaaaacatattaagactgcagtctactctatacactacagaatatggagttttagttatccagcactggcccttcttgctcttccttgtgtggagacaacagcactggggctgcctgctgctcagcttaccatgccctctgatgagacgtgagcagagtcgatgttccctgctactgtactcctggacgtgctgttggttctcccagcttagaggtgacactgttatatacaaatttttcctagccactttcagtacctggagaaagtctagagctttccccaccctgccacaggcaaggactgtcaggggacctggacagttgttatccttcctctttctttcagttcataagaaagtactaggacccagggtgcctctggagacctctcaagttcagctcttcagatgtgtcagcaggacacaggaaaactagtcgtttattgtatttcagacactgttgacccctcctcctgctgctccagtggctccctgagtagctccagttactttactccaatgttcatgatggggtagatgtgcagggcctgtgttgttttggtttagccccacagtgttattgctggagatctgaaatgtgctggttttgtgagccttggtcctatagcctgtgcctgaccatctgaacagtgtacctttaaccctcggagagcttgtgcctgctcaccatgccaaacagcaacactgcctgtagcctgccaggtctgcctggcgagttctttcttgctgtctgtgggtgtcaccactatcctcaaaggcaccaagatctgactttcagtgagtgcttctctatcttgtgtctgccatagtctccccttttctccactctcagcctgacctcacacctggtggggcttcattcagctttcaggttctgctttcaatgtagtttcatttgtaccgacccctgattcctgatgtaccacactgatcttgggcccctgttacatgcttttatgaaacccattatttcccttcataatgcttatcacaactgtaattatgcagcaatttaagttattatccgtttttctccaggagtctgtaatttccttagggcagaaattatgtctgcctcactccctgttgttgctgggcctagtgcaaaaggcttaccacacaccatcctgaaggcatgaagaggagagaactgttgccatctttgtatccctttgctcccccagggaaagagtgggccatgcctagatatctttaaaagcttttgtgaattcttgagagtaattttatagtaacgaaatgctgtacattaaataccaggtaaagcaaagttgtattaagataaacaagtgttcagggtgtcttttgctggcactattcccatagcatggtagatcagatggacccaacagatactatgtaactgctaggcattgggatacagtccgtggatgagtatgtgaaactttggggactgtacagcacaaatagaattgcgatttccaattataatctctgcttcttcctttctctgtatttcatcctcctccctccatttttcctccttcctcccttgtcccccatcttctttccaagtgttttaggacaaggaccaatttgttaatttccaatcatagaaaaactgaaagaatagcaactttatgggatggtccaatgtactcatctatttttctgtcagagagagttgtatctgcagactctctttgggaccatccagggcagtgcgcaagcatggtggttgactaagactacacattgcagcactaagttccctgtggtgcacatctgttctctttgtggattatgtgcactattgtgatatctaagatactgcttcctatgacagctgacttaggataggaagttcaggaggagaccagttctgctgtcactgtgttctgctgcctgtagtcccacatgataagattgtctctgtgtgtgctgttacatgctgctactttgcagttcatcagacattctgattgccgttcaaagagcggagagtaatgacttttttttttctctgcctttatccagcttttacttctagaaacaataaagaaaactattttttcatgcaaaatgtttatcctcaggcaatcagccacctagatgaataatcaagaaagcctgttctggtagcagaaaattcccactaggtctctaagctagagtgttcacaggcacatatcaaatgctgtgtcattactgcaacagaactcaagaaaactttaattaccggatgacttttaaaagatacatatctgtatatttgaaaaagtatagctggtagccttaaaataagccaaataaagcataacttggccagagaattaaaaacaaaaaaaacaggacaaaattttcccttgtagtctagaattggacatttaagtagtgtactaatcttactggagatggactcagttggatttggtatttgagaaaggggctcagtgtgaagtctggtctagttttcagttggcagtgttccttactcaggctctcaatactgcactgcagactcgtaccactggcaataaagacacgtccgtccactgtagttttatctggggagctcccttgctcttcctcaggtattactgtaggtttttcatgcatcctcttggaaggcacttcacgtgtccttccaaagatgtagatgtaactaaccccaaagccttgaattggtgaggaatttggagaaatttacctccattttatttattcattcattatttatttatttatttttaaaattgcctgggtgtgaagagatggcttaatgcagtgtttcacaacctgtaggtgatgatgacctctttcaggctgagtgaccctttcacaggtgttgtctgagtctaaaggaaaacacagatctttacattgtcattcataacagtatcaatattacacttaagtaacaacaaaaataattgtatggttggagtcactacaacacgaggaactgtattaaagggtcgcagcatcagtaagatgaagaagctctgggttagtggttaagagacttgttgcaaagcagaggacccagattctttggttcccagcaaccatggcagctcacaacagtccataacaggtactaggggcctgattttccattctgaccttcacagacaccaggcaccatgtgcaagcaaagcagtaatacacttaaaataatcagagaaaaaaattttacctactaatagaattcgaaatcttgatggaaatgatggcagattctctttcttaacacatagttctctggggttattattcaagaagatgttgtcccaaatctaaaccaaagttgcattttcttgagttttgttataaagtcatgggtacatgtgtgttctgtccaaccctcccccacccccatatcccatgtactcccagtgttcttcagatttcagggtcaagtattcctttctggatgccaagcctgctcccaatcatggttcccgtgctggcttcaggcagttaccaacagtaaatgtacttagaaatgtatatactcgaatgtttaaaaatctgtgatgtagtgaagttatttgtataatcttcaaagctcaaatttgagcattttcacttccttttgtttctctgagatatggctaacacattttaattttatttctcttttcctcaaccccagcatatcaataatgaccacattcatggagaaaagaaggagttcgtgtgccgctggcttgattgttcacgagagcagaaaccgttcaaagcccagtacatgttggtagtgcatatgagaagacacactggggagaagcctcacaaatgtacagtaagtgcatacctgacagcctcagtgtcccctcacacgggcgagtgtgacactttgctctctaggcctttcctgttctcaaggggtttgcatgctcttgaccccaggatctgaaagggtagtgagaagagagacagagcattgtttgtagagtaccttagtgctgagctttaaacaggccatctctgcagagtgacaggcaggcataggtgactggctccacgagcccatgccttctgtgtctgccatattcccacaggtcagcacactgcaggacaaaccacagagttgatttatttttcagtttaatttttttatttgtgcatgtagtggtcagaggataattttatggagttgattctctattgcccctttaggtgtgttacaggtatcaaactctagtggtcaagtttacacagcttgtacactgacccatcttacaggccctaagttgagcattctttatgaaaaacaaaattcaacacactgggcttcagatgtagttcatatcagagcatttagctaccatgcacaaggctctgggtgctgacataatgtaccagttagaaagccttgttcataacctttacaaccactgtgctcacaacacacgtgcattaaaactgctgtataacattactattagtgtgcacatggtatgaagcataaatggacttgtgtcttcattatgtctcaaatattacttgtgtaaattctgaaatctaaaaagagcccaagccttttggcaaggcatattcatctgcctgttgttctgtctcctcgatccttgctcagtcgctacagtgcgtagaagcccctggagtaggctggggctgcagtgagactaagttctctctagagttgctctgagtgctgcacagcccccggtactttacatcttaaagggcctttataaacatgatcaaattccatgcctttgtatggacacaaagccatattaatgaactttgtgctgaatctgaaatcagtgggaattggaggagatcaatgaacagataatgaaattcattgtccacattgagctgtctattaaaaaaaaaaaaataggaggggaaaaaagccttcgggagttttacaggcactgacaacgctttgtcttcagctgccccaagccacatctgaatcccaataaatgcagagtttagtggggtttttgttccatggttttgaaaagctgctgacccttaaaaggtcaagtttttatccacttggagagggggctgaacacaagctgcagctgctattgtgtagagtggtccagatttacctgttgtcctcagtttgaaggttgcacaaaagcctactcaagactcgaaaacctgaaaacccacttgagatctcacactggagagaagccatacgtctgtgagcatgagggctgcaacaaggctttctctaatgcttcagatcgggccaagcaccaaaacagaacacattccaatgaggtaagcttccatgtggcatatatctggtacagtagatgtgttctgttttattttctctgggttgttcaactgtgagtgggctctgaggccctgcacgtctgcagatgaaggtttgaggcctcaaggatgaaccctgtttagagagtaatgcagacgaagaagaaattctataaaaacccttgctgaacttagtttcctgttgctcggacctgccatctactggctagacagtagtagcatttaatttagtgttcaggctgcctgctctaatagcatggtcccacacaaagtaagacctggtactgtttcaagacattcagaatcatcacagtggcaggtgacagacagctcactcctaaaagcatccaattgtatttgttttcgaggagagagcagtttcatcacatgcatgatatctaaaattattttcatcaagcaaacagcttaaaaacagtttatagagatctaaattccagaggaccttggaagatattcttagaagcccagttaatatttaagtctgttatcatagtggtttgtgttgtattgccattatttttaagacatttgtccccagactactgataagtataaaaatggttacagatttgcattagctaggctttgatgcatatctgactaaaagcgtagaacttcttcttgggagctgtagatgaatattggctcctctgtaaactcccttgaatataccaagcctaataaagctccctcattttggatagaaatgagattgtagttcaggccggccacatgtgtccttgcttgatttgaaacattgttgcaaatggagaaatttgcatgtgtgcaacttcagagtggccattatgacatcatcagttgtaggctactcttacagccttgcaatatctaaaccaagtgaggcactttgctcaggagccatttggctttaagcagaggtagggggaatagtgtggtgatagaataaaacagattaaaatgacctttaatgagatcatctacactgtctaaaatacttgaaactcaacagttgcaggtccacagacccaggtccacagaccccagctctttcgaaaggtcatggtatgataagaaaggacaggtcattttgaatctcctgttaatgacctaggaagacaaatttcattttttattataatgttaaaagctttttctgtatataatagccaccggaacattttagggagtctagaatgggcaaatccatggagacaaaatagattggtatttgttaacacttaaggccaaggaaatagcaggctgctgattttggagtgctagaatattctagtttattacacaacatgaagaatgtcctcagttcgttttttttttttttttttttcaacctcagtttcaattcatagagttgaaaacctctgcttggaatttcaattaacatagtaattaaatttagctatctttcatatacttaagtaaaagaaggcattcattccttttgtaaagtttaggccaacctctcctgctgtagagaaatttggtcagtgaatatattgagacagggatgcacaaatacatagattttcattttttatgaatttaaaacatgtacagacatctgcttattttaggtatggtctagttatttattttttctttgatgagattaagaaatacaggattatatgagaattgaacatctcaggaaactagaagatgacttgggcaataatgttattaccaggaatgaggaacttatttaaatgggttaccttgataatagcacttaattaagattcactcacattcaagtcatttttctctataacatgtatgagactcttaggttttgagtatagaagctggcacagtttcacatatacagaagataggcctgtcctggaaatccaggttcttgtaggcaagttagcccatcttaaataaatcctgatacgcacttgcgtttatttattgtcttatttatgactgtgaagactttttgctatgttaggtagagctaagaattcagcagggtagatccagacagcaggtctcttacataacagaaaagctgtcgtggcatttctctgtctatgactttgttcatgatctttcagggcccttgggctgtatagcagtgacctctgaaaggactccccattctagatcatacagtttgtattcctcctggagccacatttatgcccatgctccggaccactcatgagcaggatcttttctagggacccttcatttttggcatcatcttgttaattgcttttattccacagaatctcattctttgttttcgctacctagctgaagtgcttcctcataagaaatgctccattgagcaagtgtttactatatgggtcatgtgtggttataagcatcttatgtacacgtgagatggaagttaagcgcagattttattaactgacacacctcccaggattatcccaaccaaaaaaggagtcctcagttgtctacatctttgggattcatactttatactataaatgattacatggtctcatttttcctaccagaaaagaagattctgcatacaaaatataagggattacataaatgatctttttattgaggttacacatctttgtgtgcaggagtcttgcatatagtagtactcatttgatgttcagtgaaaaataaaatttatctgggaatagtagctcaatgctgtaatcccagcacctgggtggctgatgtgagagaattcacagctagtgtaggctgtggaaaaagaacttattcctctgtctgataaattgtatagtcaggagaaaatgcatcagttgctttccaaaggtacctgagtatgcaagtcacaatggcaaccatcatgcctgaggatgaatgtccaggacatgagaagttggccccttagtgtgtctgctatcatcctggcattgtattgctatcacaggctccatagttgtggttatgtggtttgttttaaagcataaacttcaagaacctgtgttcttatggggttttgtaggtgacatttaatgtgcatgttcatatacaagggtacatggtcacaggtgtgcttgaaaatgctagttctgatgaacttctctgtgctcattgcccatcagctgtgaactcatttccaggctaatcttaatatgcacatgagtgtgtttataggaagagtagctcttcctgtccccgtcctgtgccctgtcattgtcctctctccccttgcccacacacctgcatcaggcactctgctgatggagcagcctgtcccatcagtgccctgagcaagcacagggttgatatacaaacacccaaaggtaatggcactaactgtcagagccattcttctgtccctaatgcatgaaatcctgcactctcatttcgtcgtgtatatgcggcaaatcacagagcccctgagtagacataatttgtagttaatgggaatcaattctatccaactgaatcttacatttgaaggtaaagtctctcaggataatgttcggaatcttcgcttctctacgttacagaatttcggcattttaggttgctctcattctggccttaggcttttagtgaaaaagcatcttttagacatgcattctgcaagacagggtgttcagcaaggataagagatatattattttaatcatgcttttcatgatgatttcttatatactagctcaccttctggtacacagagatggaagtacataatcctctcatggctttcagcaagggagcatgtccggaacccctacccacaccagaatctgagaatacatgagtctcttcaataaagtgctgcgatagacagacagacagacagacagacagacagacagacagatagatagatagatagatagatagatattctctcatacttctgattacatctaatgcatgctgcagtgtaaatgccatttaaatagctgtgatattgtttagggaatagcaacaagaactatctactcatggttgctacatgtataaggttttcacactacaggtgtgaagttttagtgttttcaatctgaagtcagttaagtttgtggatgtcgagcccttagcatcccattattatcccattgctactattttggcagacaagaaaacaaaatcaccattctaacattgctgattaacaaagggatcagttctgtaatctatatgaataatttgatataaatgcccctactgtatcaggaggcatggtacacaactcagggagaaaataaaattagcaggaaggaagtagttctgccttgtgtagacctggaaagtcagaggaaagcaaattgagagactggttttccataaatccatcatgagccttgagggctatatggatagtctgtaatgaggctacaactttagagaccagagaccttctgagaatttttacatctgaaccccaaacaattgtaaggctacccagctacccaaatgagcacttttcattaaacaacatgagaacagctctgggcagcttagttttatttcttcttattataatacctttgtacaaatagcacattttcaaagcaaagaattattatatcgcagaaccaagataataaatttcttcacacatacatctcctgtaagatgtataaaattgtcctgatatcatcttcttgtaagcctctctccattatcatcatcagtagatggagagccatgatacttccactcacagcataaatgcttccaacaatgtaaaggcaatttatacactattactacttacagagctctctaaataatacctattaagctagattctatggacactgagcaatatcaaataggctttctaagtcattagacctgtgaggtacctaaatgctgtggaagtacttttgcaagaattagaattgtactgagcaactgcaagtcataatcacttttattgccattcatcaacaatttctttttgtggaatttgctagaaaccgtatgtatgcaaaatccctggctgcaccaagcgttacacagaccccagctctctccggaaacacgtgaagactgtgcatggccctgaggctcatgttaccaagaagcagcgtggggacatgcaccctcggcctccacccccgagagattccggcagccattcacagtccaggtcccctggccggccaactcagggagcatttggtgagcagaaggagctgagcaacactacctcaaagcgggaagagtgcctccaggtgaagactgtcaaggctgagaagcccatggtatgtcattcactctcctgttctcccagagccaagcactcattaagaaaaacccagatgaacatgtcaagggatgacaccatccccctccattgtatctggccactctgacttgagagtcgtgagcccagtgattgagactgctcactcaaagttaatctgcttagtcaataactttgctcaaagggagttgctaagattcttacctgacttataaaactgatccatagctgtaccacttgtggcagacagacgtggctgtcagtgtcttcaatgcggctactcagtagaaaatcattccttgagcctttctgcaaatacgctttctgtcttccgtgccctgttgaccccaagatgaataagccgaagtccttattctttggggttttacagttcagtgggatgtacagattgaaaaacaaatacaattcagatgatgaggcttaaacaacaagtctgtgaaaagccttctagagaaggagaattggcagtgtgctccaagggcagaggccccaggacagttcagcactcagggagagccagtggctcctggggaatgggagggagacgagaggtatcagttgtgggatttgccagagcgaagggggagagggagtagggcaaaggcaagactagggtgtgatcatgggcttaacagctctagtcttaaggattgcagtacaggtcagggagagtggagacaggcacaagattcgcatgtcaccacaacccaagataccttctattgcataaaaaatgaggattgtcagagttatttgtagcagtttctcttaaaattgacttggtatgtgaatatttataggcaaattatattataaagatagaactcaaacagctgcagaccgaactctatatttccaggtgagaaaattggagtttcttgaggtgaatcacggggtcctgttgaggtgaatcacggggtcctgtttcctcaacagatgtcgtgtgctcatggccattaaataccagataccttcacagacatgtattaatgaacattacatttctaatataatttcttttaaaacttgtctttaatttggtcatcatgctataaattaaattctctcttcctttttcttattaatgcaacacctcttctgtctattgctcccaaatgtcttgttctcacttcctaaggacagtgggtaataaggtgagggaattttgacttctctattttttttgttttgttttgtttggttttcattttaacatgcaagccttcttcccattttatcttcctttggtttctatggcattgtgacatccttggtgagcattgctcagctctgtgccttgaacatagcatgtgaaaacggggaagttagatgatcattgttacttttgcctgggacttcataatcaatcacactgggccaaccaagcagttgttctcaaattctagttaattactatcttgactagcataaattcaagtgtgggactggatatgtactgtgttctttgaggaagacctggataaatttgttagcaatttaacctccattcagttgagtgcatataagtagtttcctgattgtaagtacctgtgccttcttaccattctgtggcatgtgtgtgtgcgtggtcctatacacatatttgtgtacatacatatttttattattatgttgaagaatgaaacttacccaaagctttaaaaaaaactcccaatacttctggaagagttgatacctcaatattttgcagaggcaaaataattaagaattttcatactcatgatcggatttacaaatcttccttagctctgcttggttgcccaaggttgaagttaatgttccgcgtggcacttgctgagaaagtacgcatttgcttgaattcatatgttgtggaagtaataaagctagaagactccccaagagagttacctctacaaacacgttctcaacagcattgcgcatcccacgtgagaatcactgagtgaatcttttacctgctgttagtggctctagttttttataggaacactggagctggtactgcagaggctcagattagccatcttaggggtctaaatattgtaactttcagtggccagtgaacttttctaaacaaaacgaaagatgtgacttcatgtaaacccttacagctttagatagaccaaccagttgtgcagtgtgagaactatcctgtgcactataggtccgttcacatggtcattcccagactctgagagagccggttactgttcattaagccctggctctttgattgagacttgtcagtaggattaagttttcattagttacagaattctcttccagcatttatttggttaatattagatcatactgagagggacacacaccaagaggaactgtaaaatcattctacaaactcagggctactatccattgcagcctgtcttccctcctgagtgtgacagagcaagatgacttatgttttaccagttgcagcctccttgattcagacagggaggaaaacatagaaaacataatttgagaaccaggtctgaatagcctagagggctctttgttgggaggagataaagtgttttatgaagcatgtgaatgctgtagttcagcaactggaactcagttgtaactataagaatcaccaaagcttatgacctcatctttagctttgccaggtctttatacttaggtactcactgggatttatactaatttccagtaacaattgatccattaggaactgatcccattatatacacagattctgttgtagtgaatggttaagaaatttgcccaaaaataatgtcctggagatagaattgaaaatgaggaagtatttctccatagttggcatttgaaaccacagggtctcatggctgatagttctgatcacagcacatctagcatcgtctaccatccatcacctcccttgtgtatcagcctgattggtgggccattctcattttggcccaaacatctaccaacacatagtttttcttctcatataacctgttgataccctgaaggttttggcttgcatgaactgtcattttggctccctctcttttacccttcctgatgtcatttggttcctttctccttgaccccaatagacatctcagccaagccctggtggtcagtcttcatgcagcagccaacagtcccccatcagcaactattccaacagtgggctcgagcttcctctgactgatggaggtagtgtagcagacctcagtgccatcgatgaaaccccaatcatggactcgaccatttccacggcaaccacagcccttgctttgcaagccaggagaaacccggcagggaccaaatggatggagcacatcaaacttgaaaggctaaaacaagtgaatggaatgtttccaagactgaaccctattctaccctccaaagcccctgcggtatctcctctcataggaaatggtacgtcccaccctagaccatgtgtctgtctgctcaggctatttcttttcctttcagtgtggccagaatacaccaagcagatctggaacccttggttttatatttgttagtttctttacagatcctaaatggaggctagaccgtaacctgtgttgatgttgaaccattcgcactgcttttccagattgcctatattttgaaaataatagcagaataatactagaataaaaacttaaaatgagaagaactcagattttgatgaagaaattataattgcttgaatttgagtggggcaagaaaaccttcagtagaggcccttgacctgtgaaggctctatgccccaggataggggaatgccagggccaggaagcgggagtgggtgggttggggagcagggggatcggggagggcataaggggttttcaagagaggaaaccaggaaaggggataacatttgaaatataaataaagaaaatatctaataaaaaaaaatcctgggggtggcgggggggggggggggcggagaaagaaaagaaaaacctccacaataagtatatttatagttagtgccacaaatctagtctctaaaaaacataaaacctagttcaaggagctacaaatgcttgtcagaacctgacttaagaaatgctttaactttacattctcttccctccctctgtgccttccctccaggcacacagtccaataacaactatagctcgggtgggcccgggaccctcctcccgagcagaagtgacctgtcaggtgtagacttcacagtgctgaacacactcaacaggagagacagcaataccagcactatcagctctgcctacctgagcagccgcagatcctcgggcatctccccctgcttttccagccgcaggtccagcgaggcgtcccaggctgaagggcgaccccagaatgtgagtgtggctgactcctacgatcccatctccacagatgcttcaaggaggtccagcgaggccagccagggtgacgggctgcccagtctgctcagcctcacacccgtgcagcagtaccgccttaaggccaagtatgcagctgccacaggtggcccaccacccacacctctgccccacatggagaggctgagcctgaagaccaagatggccttgctaggggaagggagggactctggggtgaccctgcctccagtccatcctcctcgaagatgcagtgatgggggaggtcacacatacagagggcgtcacctgatgcctcatgatgcactagcgaacagtgtgaggagagccagcgaccctgtgaggacagtctcggagaacatgtcacttgccagggttcaacgcttcagcagcctcaatagctttaatcctccaaatttgcctccatcggtggaaaagcgtagcttagtgctgcaaaattatacccggcaggagagcagccaaccccggtacttccaggcatccccttgccctcccagcatcacagagaatgttgccctggaggctctgaccatggatgctgatgctaacttgaatgatgaagacctcctgccagatgatgtggtacagtatttaaattcccagaaccaaacagggtatgggcagcagttgcagagtggcatctctgaagacagcaaagtagcccatgagccagaggacttggacttagcagggctgccagacagtcatgttggccaggagtacccagctctggagcagccctgctctgagggcagtaaaactgatttgcccatccagtggaacgaggtcagttctggaacttctgatctgtcatcctccaagctgaagtgtggtcagcagcgccctagcgcacagcagcctcggggttttgggctatacaacaatatggtggtacacccacataatctgtggaaggttggcactggcccagctgggggatatcagaccctcggggagaatagcagtacctacaatggcccagagcactttgcaatccacagtggggatggacttggcaccaatggaaatactttccatgaacagccctttaagacccagcagtatgggagccagctcaacaggcagccactgacttccagtgctctagatcatgcctgtggtacagggattcaagggtccaagctaaaaggcaacagcttgcaagagaatgggggtttgctagatttcagcctgtccgtggcaccaaatgagttagctggcaacacagtgaatggcatgcaaacccaagatcaaatgggacagggatacattgcccatcagctactcagtggcagcatgcaacaccaggggcccagccgccctggtcaacaggtactagggcaggttggtgctacctcacatatcaacatctatcaagggacagagagctgcctaccagggactcaggacaacagcagccagccatcaagcatggcagctatcaggggctaccagccctgtgccagctatgggggtaacaggcgtcaggcaatgccaaggggcaacctcactctgcaacaaggacagctcagtgacatgagtcagagcagcagggtgaacagcatcaaaatggaggcacaaggtcagtcccagcagctctgctctaccgtgcagaattattccggtcagttctatgaccaaaccatgggcttcagtcagcaagacaggaaagctggctcgttctccctctcagatgccaactgcctgctccaagggaatggcactgaaaactctgagttactctccccaggtgctaaccaggtaacaagcacagttgacagctttgagagtcatgacctagaaggtgtgcagattgattttgatgccatcatagatgatggggaccataccagcctaatgtcaggggccttgagcccaagtattattcagaacctttcccacagctcctcccgtctcaccactccgcgggcatccctcccattcccatccctatccatgggcaccaccaacatggctatcggggatatgagttctttgctgacctcccttgcagaagaaagcaagttccttgcagttatgcagtaggcggtaggcaaggaggaccacaaacacaaagactgaaatgacttgggatttttttttcttttttaagttctgtgtgtattttagcaatctcatctcacctgattgggatgtgtctcaagtatattccttttatggaaaaggactctgaaaaaccctaaggtattctaggggaggaactgtcttccatttcagtttgaatcagtattgtgacattcaaatcacccttgtttttttgttttttgtatttttttaaacctgtaagcctgccctcttttgagtgaaccaatgtaaatgtatactgcgcatgttctttcttttagaagagaagtcatcaagttaaaagatttggcctgcttctctgctaacccaggaactaggaattggtgggcttgtgaccaaggggtaacaggtccacctttttaaagtttttctttacagtactcagtgacttgcttttatgtgtgtatgtgtattttttattcccacactgagtacaagaattgaatgaatagtgagcttgaagattatttgtgggtgcactatagttagtataaatagcaggttttcacgtgtcctccaccttgattcaattcagggcatacttttaacagcttcacaaaagtggaaatgtggggatcctggaaatgaagtagtttgatgagggtttttatagggggtaattcttatgtaagtacgcatcccgtgggtatgtctatatggtcagctctccattatctcctgtacattcccttcacctttatgaacattcagtgttatttagcactgcagtgagagtggacaggcagttggtgttcagatgtgtcacacttttagctttttggtacgaagttagaccaattataggttgaaacaattgggtagaattacttggaggactgttttttggacttgctataattattcattagtcccacctctttcctcattgtcataggtaactgagaattgaattgactatacatagctctaagtaggtatttaagcagcccacaactggatacatcactaccgtttattaaattcactacagcaagagaatatgtcctttctaagtgccctattataaaggaaagatgtgtaaaacctagttataaaaggcaaaactcacatacattgacatcagaaataaattactttaaccagttttagcactggagagcatgaaagttgatgtttagtagccatgtgaatttcagataccattagtccttaccattggactagggcttttgttttgtattcagattttaaagatttacacagtgcagctgctcttcacatgtagatcagatatgagagtcatactgtgtgtacacagagttcagggattatcttagcatactactttaaaaccgtaaacaattaaagtgtttacccatcagccccaacatggaatttccccaaggctgttattgaccgggttgtgtgacttctcctcttaaatcctgcctgtaaatttaggagtaggaaggcgaaacccagtaggtgttaggtaataggaaggatgctatgaccagccaatttcacttaggcctgttttctctcttttggagcccaaacttcaccagggaagaaactttgccatgtaggatgacgttgtggctaagctagctttctgatagatgtccccaggaccagtcaaaccatctgtaagttcaccgtgccctgcagccttctcccagaggttccttataaatcaaaggacagcccacaagaaaggggaattactggtctgagttcaggagagtaaataaagcaaggcttctttttgcctcaaacaggtcacagtgtcatcacaaaatgggtgatggaatccctgaatttcatttatcaaaagtcttttttgttttttaatctctggtttgggtctgacctggcatgccttattatttggccaaatctctttattacttttgatttcaaagaaggggttcaggaattcttccttcctcagcaagaagaatgagcttggtttctggtcacacccattgcctcctgcagcagagacctctctaggtggaggccttgcatgtgaccttgatgttctcaagtgcagtgattttccatgttagcggtccctcctaggaatgcagtgcacagagccagcacccctgccttcttaccttctgcttttgactttttcattgttttcttttttcattgtttttttttttcatccttatttttcaagctattgcctttagatttttggagttgatgtttccactcactatctgacctttcttgatatgaagatttcaggatacagatttaaaaaaaaaaaaaaaaaaaaaaaaggagagtcaaaagtgttctatcccaagatttcaccaatctgtcctgatagtccagttcaagaatgatcatttggtcactatagctaacccatgggacatgagatctctttaggcttggtctttcctgtcaaaatcccactcctggtcagcagcccctttccagtccttggctcttgtatttaggagaaacagctttggctctctcatgtcacacacagctgctttttaatgaaagtacaggctcatacatggtactcttgtttaatgtctgtgttaaatggtttggtgtttgtttgtttttttccataatttttctaaagaattaaagaactcacttccctgctcctcacgtgttggcttgtcctgagccacgggttttgattcttgcaatgtatgtgccttattttatgtttctcttgtcgatgagaaggaccagttgttgttgttgtccagtcagcactcagaggctgcatgcccagacagtgtcaccaggaagtgaacacaggactgtggcagtctgcggtgttgggtgacccgatttcctgtgttgtttgaagctaataggagggtgttctcctctgacaagttacgcttgtatatcctgcagatgtgtaaaataaactgtgttccttttcgccaccattttttagattttttaaagaagaaaatgtgtaatcctttttaaagaacaacacaatgtaaatacattcaagtattgtagacgtagagttgggatgtgatggcctcgggccttccttggaaaagcctgtggctgctcagtgctcctaagccatgagaatggcagcccagaaacatgaactctgccttggctttcagaaccacttagtccttttataacaaagaaaaaaataaataaataataaaaatgtttcttacagtgtcaataaaaaaaactttgtactgaaatattctactggatttcttttatttaattcctgtttttaagaaaaggacacgttctcaagaaaactccccaggctatagttgactccccagtgagtccatgggaaggagacttctgatggtaatgtggagggcactattgcaaaccagtgtgaacagcaaaggagacaacatttctgaatgtagatagtcactggaagctgtgttaaagtaagcctccatgggctggtgagatggctcattggttaatggcactggctgttccagagagttgagctttgattctcagcacccacatggtagcacataaaggcatgcaactctagctccagggttatattagacttatgttagaggtctctagagagacagagatcatagagatcgtgtgtgtgtttgtgtgtgtgtatgatttattaaactggcttacaagctgtggtctagctaatccaacgatggctacatattaacagaaggtccaaaaatccagtagttgtttaatccatggtcttcagtgttctctgaaatcccaaagaagtaggctttaatgccagtgaagaaatatacttgctaacaagagcaaacaaggaaagcgattatttccttcttccaagaagtgaagtctaagttaaagatagatcctcccaccttagaaatctggattagaggtttaccatcctgcctcaaagacatggattagaagtgagtctttccagatgatttaattaagaaaaaaaaaaatccctcacaggtatgcccagtcatttgggcttttgttaattccagatgtagtaaaagtgacaactaagaatagtatccatcacaccagttgaatttactgtatttattcactagaaggagatgaaaatgctggcaaattaattgatagtataagacattcacctcacatacacaaggttgtacagagcatgttaataggcctatgtttcttatttttactgatttgtccaattctgtggaagggtgataagagggttaaaaatctgacaacttgtctcctttttatatactatccttttatctagagatacacgaacacataaatgaaaacctggcaatatagagacttttccagcacacttcttttaaatttctactttattctatgtgtatgagtgttttgtctgtatatatgcctataaaccatgtgtatatctggtacccacagagccagaagagtgcatcagatcctctaaaactagggttgcatgtagtcttgagccaccatgtcggtgctgagaatcaaactctggaagaatagcccgtgccattaaccactaagccatctctccagccccatggaggcttactttaacgtggctttcaatgactaactccatttagaaatatctttgtctttgcattttcacactggtttgcagtagtgctctccacattaccgtctaaggtctcctttgcactttgtcaatgcatgttgtatgccatcaatttagcactgttgctgggaaacgggtgctgactgggtatcccaagacacagtatcagagcatcctttgtaaacacaggcacacatgaacttgagcatgccctattcattcccaaggggaaattccattgcccccaaatgctttgatctctcacaaaatgtatccaaataaatttggggaaaaataagaaagcttgaatttggaagggtgaatgagaggactgcagaagcaacacagcttctgggacagaccccttttcgggctccagacatccgagctccttccccgccagagaagaggtttctgcctgggagggcttggcctgagcaggtaagggggccatcttaggtccggatacctcagagactagtctgcccaggtgagagtgcagactacagaagcaacacagcttctgggacagaccctgtttcgggctccagacattccaggcagaggagaggtgtctgcctggaaggactctgaccaccagagcagatgagagagtcatcttgtgtcccctgtccctcggagaccagtctgtgcaggtgagcatacagactgcagaggcaacacatctgggaaaggccctgttttgagccttcatcttcagccaggaggcaggtctgaactccagatatctgtgcaccttccctgcaagaggagagcttgcctgcagagagtactctgaccactgagactcaggatagtgctagtctcccaggtctgctgacagaggctaacagaatcacaggaggaacaagctccaatcagagacaactataacaactaactccagagattaccagatggtgaaagccaaatgtaagaatcttactaatagaaaccaagaccactcaccatcatcagaactcagcactcccacctcagccagtcctggataccccaacacacacgaaaagtaagactaggatccaaaatcatatctcaagatgctggtagaggacttcaagaagggctttaataaatcacttaaagaaatacaggagaacactgttaaagaggtagaagtcgttaaagaaatacaggaaaacacaaccaaacaggtgatggaattgaacaaaaccatccaagacctaaaaagggaaatagaaacaataaaggaaacccaaaatgagacaacgctggagatagaaaccctaggaaagaaatctggagccatagatgtgagcatcagcaacagaatacaagagatggaagagagaatctcgggtgctgaagattccatagagaacatgggcacaacaatcaaagaaaatgcaaaatgcaaaaatatcctaactcaaaacatccaggaaatccaggacacacatgagaagaccaaacctacaggtaaaaggagtagataagaatgaagattctcaaagggccagcaaatatcttcaacaaagttatagaagaaaacttcccaaacctaaagaaagagatgcccatgaacatacaagaagcctacagaactccaaatagaaaagaaaatcctcctgacacataataatcagaacaacaaatgcactaaataaagatagaatattaaaagcagtaagggaaaaaggtgaagtaacatataaagacaggcctattagaattacaccagacttctcaccagagactatgaaagccagaagatcctggacagatgttatacagaccctaagagaacacaaatgccagcccaggctactatacccagaaaaactctcaattaccatagatggagaaaccaaagtattccatgacaaaaccaaattcacacaatatctttccacaaatccagcccttcaaaagataataaagggaaaacaccaacacaaggacagaaactacaccctagaaaaagcaagaaagtaatccttcaacaaacctaaaagaagacagccccaaaaacagaatcccaactttaacaacaaaaataacaggaagcaacaataattttactttctcttaacatcaatggactcaattccccaataaaaagacatagactaatatgctggctacacaacattttattgcttacgggaaacccacctcagagaaaaggacagtcactacctcagagtgaaagtctggaaaacaattttccaagcaaatggtcctaagaaacaagcgggagtagccattctaatatcgaataaaattgacttccatcccaaagttatcaaaaaagacaaggaggggcacttcatactcctaaaagataaaatctaccaagatgaactctcaattctgaatagctatgctccaaataaaagggcagccacattcattaaagaaactttagtaaagctcaaagcacacattgcacctaacacaatagtagtggaagacttcaacaccccactctcacccatggacagatcctggaatcagaaactaaacagagacacatggacactaactgaagttatgaaagaaatggatttaatagatatctacagaacattttatcctaaaacaaaaggatataccttcttctcagtgccacatggtacctccttcaaaattgaccatataattggtcacaaaacaggcctcaacagatacaaaaatatttaaattatcccatgcatcctatctgatcaccacggactaaggctgatcttcaataacaacataaataatagaaatccaacattcacgtagaaactgaaaaacactttactcaatgattccttggtcgaggatgaaataaagaaagaaattaaggactttttagagtttaatgaaaatgaagccacaacacacccaaatttatgggacacaatgaaggcagtcctaagaggaaaactattagccctgagtgcctcgaaaaagaaaatagagagggcatacactagcagcctgacagcacacctagaagctctagaactaaaggaatcaaattcacccaagaggagtagatggcaggaaataatcaaactcagggctgaaatcaatcaagtggaaacaaaaagaactatttaaagaatcaaccaaaccaggagctggttctatgagaaaatcaataagatagataaaccctcagccagactaactagagggcacaggggcagtatcctaattaacaaagtcaaaaatgaaaaaggaggcataacaacagaacctgaggaaatccaaaacatcttcagatcctactacaaaaggctatactcaacaaaactagaaaacctggatgaaatggaaaacttcctagacaggtaccaggtaccaaagttaaatcaggatcagattaacgatctaaacagtcccatttaccctaaagtaatagaagcaatcatcaatagtctcccaaccaaaaaaggccaagactatatgagtttagtgcagagttctttcagaccttcaaagaagacctaattccaactcttctcaaactattccacaaaatagaaacataaggtactctaccaaattcattctatgaagccacaattactctgatacctaaaccacacaaaaatccaacaaagaaaaagaacttcagaccaatttcccttatgaatatcgatgcaaaaatactcaataaaatcctcacaaactgaatccaagaacattatcaaaacgatcatccatcatgaccatgtaggcttcatctcagggatgcagggatggtttaatatatggaaattcatcaacataatccactatataaacaaactcaaagacaaaaaccacatgatcatttcattagatgctgagaatgcatttgacaaactccagcaccccttcatgataaaagtcttagaaagatcaggaattcaaggcccatacgtaaacataataaaaacaatctacaacaaaccagtagccaacatcaaactaaatggagagaaactcgaagcaatcccactaaaattgtggactagataaggctgcccactttctccctacctattcaatatagtacttgaagtcctagccagagcaattcaataacaaaaggagatcaaggtgatacaaattggaaaggaagaagtcaaaatatcactttttgcagatgatataatagtatatataagtgatcccaaaactttcaccagagaactcctaaacctgataaacaacttcagtgcagtagctggatataaaattaactcaaacaagtggcctttctctacacaaaggataatcagactgagaaagaaattagggaaacaacacgcttcacaatagtcacaaataatataaaataccttggtgtgaatccaactaaggaagtaaaagatctgtatgataagaacttcaagtctctgaagaaagaaattaaagaagatctcagaagatggaaagatctcccatgctcatgggttggcaggattaatatagtagaaatggctatcctgccgaaagcaatctacagattcaatgcaatttccatcaaaattccaactcaattcttcactgagatagaaagggcaatttgcaaattcatctagaataacaaaaaacctaggatagcaaaaactattctcaaggataaaagaacctctggtggaatcaccatgcctgacttcaagctgtagagcaattgtgataaaaagtgcatggtcctggtacagtgacagacaggtacatcaatggaatagaattgaagaccccgaaatgaacccacacacctatagtcacttgatctttgacaagggagctaaaaacctcaacaagtggaagaaaagacagcattttcaacaaatggtgctggcacacctggcagttatcatgtagaagaatgcatatttatccattcttacctccttgtacaaagctaaagtctaagtggatcaaaggacttccacataaaaccagagacactgaaattaatagaggagaaagtgggggaaaagcctcgaagatatgggcacaggggaaaaattcctaaacagaacagcaatggcttgtgctgtaagatcaagaattgaaaaatgggacctcataaaattccaaagcttctgtaaggcaaaagacactgtcagtaagacaaaaaggccaccaacagattgggaaaggatttttaccaatcctaaatcagataggggactaatatccaatatatacaaagagctcaagaagctggactccagaaattcaaataaccccattaaaaatggggtacagagctaaacaaagaattctcaactgaggaataccaaatagctgagaagaacctgaaaaaatgttcagcatccttaatcatcagggaaatgcaaatcaaaacaaccttgagattctacctcacaccagtcagaatggctaagatcaaaaattcagatgacggcagatgctggcgaggatgtggagaaagagggacactcctccattgttggtgggattgcaagattgtaccaccacactggaagtcagtctggaggttcctcagaaaattggacataatactaccagaagatccagcaatacctctcctgtgcatatacccagaagaagttccaactggtaataagaacacat

SEQ ID NO: 1075 - DNA, 5117 bp, Mus musculus
ccggcccacgccacaccatgcccgccggggccgcacgctgggatcagtcaggccatccacggtagcccgagtccgcctgccgctccgccggcgcaggtctgtggatttgggacctgacagccaaagccgcagggattcctttgagaaacaagctgaagtaatgagaagacattatggaggcccaggcccacagctctacggcgactgagaggaagaaagctgaaaattccattgggaaatgtcccacgagaacagatgtcagcgagaaggccgtggcctctagtaccacttccaatgaggatgaaagtcctggacagatctatcaccgagagagaagaaacgcaatcactatgcagcctcagagtgtgcagggtctcaacaaaatcagtgaggagccctcgacgtctagtgatgagagggcctcgctgatcaagaaagagatccatggctctctaccacatctggcggagccctctctcccttaccgtgggactgtgtttgccatggatccccggaatggctacatggagcctcactaccaccctcctcatcttttccctgccttccatcctcctgtaccaattgatgccagacatcatgagggccgttaccattatgatccatctcctattcctccattacatgtgccttctgccttatctagtagcccgacgtatccagacttgcccttcattaggatctccccacaccgtaatcccactgcagcctcagagtcccccttcagccccccacacccctacatcaacccatatatggactacatccgctcattgcacagcagcccatccctctccatgatctctgctgcccgagggctgagccctacagatgctccccatgctggagtcagccctgcggaatactatcaccagatggctctgctgacaggccagcgcagcccttatgcagacatccttccctcagctgccactgctggtgcaggggccatccatatggagtaccttcatgccatggacagcaccagatttcccagccctaggctgtcagctaggcccagccgaaagcgcacactgtcaatatcgccactgtcagatcatagcttcgaccttcagaccatgataagaacatcccctaactccttggttacaatcctcaataattcccgtagcagctcttcagcaagtggttcctatgggcacttatcggcaagtgcaatcagccctgcattgagcttcacctacccctccgctcctgtgtctcttcacatgcatcaacagatcctaagccgacagcaaagcttaggctccgcattcggacacagccctcctctcatccaccctgctccaacatttccaacacagagacctatccctgggattccgacagttctgaaccccgtccaggtcagctctggcccttctgagtcctcacagagcaagcccacaagcgagtctgcagtgagcagcactggtgaccctatgcataataagcggtccaagatcaagcctgatgaagacctccccagcccagggtcacggggccagcaggaacagccggaaggaacaaccctagtcaaggaggaagcggacaaagatgaaagcaagcaggagcctgaagtcatctacgagacaaactgccactgggaaggctgcaccagagagttcgacacccaagatcagcttgtgcatcatatcaataatgaccacattcatggagaaaagaaggagttcgtgtgccgctggcttgattgttcacgagagcagaaaccgttcaaagcccagtacatgttggtagtgcatatgagaagacacactggggagaagcctcacaaatgtacatttgaaggttgcacaaaagcctactcaagactcgaaaacctgaaaacccacttgagatctcacactggagagaagccatacgtctgtgagcatgagggctgcaacaaggctttctctaatgcttcagatcgggccaagcaccaaaacagaacacattccaatgagaaaccgtatgtatgcaaaatccctggctgcaccaagcgttacacagaccccagctctctccggaaacacgtgaagactgtgcatggccctgaggctcatgttaccaagaagcagcgtggggacatgcaccctcggcctccacccccgagagattccggcagccattcacagtccaggtcccctggccggccaactcagggagcatttggtgagcagaaggagctgagcaacactacctcaaagcgggaagagtgcctccaggtgaagactgtcaaggctgagaagcccatgacatctcagccaagccctggtggtcagtcttcatgcagcagccaacagtcccccatcagcaactattccaacagtgggctcgagcttcctctgactgatggaggtagtgtagcagacctcagtgccatcgatgaaaccccaatcatggactcgaccatttccacggcaaccacagcccttgctttgcaagccaggagaaacccggcagggaccaaatggatggagcacatcaaacttgaaaggctaaaacaagtgaatggaatgtttccaagactgaaccctattctaccctccaaagcccctgcggtatctcctctcataggaaatggcacacagtccaataacaactatagctcgggtgggcccgggaccctcctcccgagcagaagtgacctgtcaggtgtagacttcacagtgctgaacacactcaacaggagagacagcaataccagcactatcagctctgcctacctgagcagccgcagatcctcgggcatctccccctgcttttccagccgcaggtccagcgaggcgtcccaggctgaagggcgaccccagaatgtgagtgtggctgactcctacgatcccatctccacagatgcttcaaggaggtccagcgaggccagccagggtgacgggctgcccagtctgctcagcctcacacccgtgcagcagtaccgccttaaggccaagtatgcagctgccacaggtggcccaccacccacacctctgccccacatggagaggctgagcctgaagaccaagatggccttgctaggggaagggagggactctggggtgaccctgcctccagtccatcctcctcgaagatgcagtgatgggggaggtcacacatacagagggcgtcacctgatgcctcatgatgcactagcgaacagtgtgaggagagccagcgaccctgtgaggacagtctcggagaacatgtcacttgccagggttcaacgcttcagcagcctcaatagctttaatcctccaaatttgcctccatcggtggaaaagcgtagcttagtgctgcaaaattatacccggcaggagagcagccaaccccggtacttccaggcatccccttgccctcccagcatcacagagaatgttgccctggaggctctgaccatggatgctgatgctaacttgaatgatgaagacctcctgccagatgatgtggtacagtatttaaattcccagaaccaaacagggtatgggcagcagttgcagagtggcatctctgaagacagcaaagtagcccatgagccagaggacttggacttagcagggctgccagacagtcatgttggccaggagtacccagctctggagcagccctgctctgagggcagtaaaactgatttgcccatccagtggaacgaggtcagttctggaacttctgatctgtcatcctccaagctgaagtgtggtcagcagcgccctagcgcacagcagcctcggggttttgggctatacaacaatatggtggtacacccacataatctgtggaaggttggcactggcccagctgggggatatcagaccctcggggagaatagcagtacctacaatggcccagagcactttgcaatccacagtggggatggacttggcaccaatggaaatactttccatgaacagccctttaagacccagcagtatgggagccagctcaacaggcagccactgacttccagtgctctagatcatgcctgtggtacagggattcaagggtccaagctaaaaggcaacagcttgcaagagaatgggggtttgctagatttcagcctgtccgtggcaccaaatgagttagctggcaacacagtgaatggcatgcaaacccaagatcaaatgggacagggatacattgcccatcagctactcagtggcagcatgcaacaccaggggcccagccgccctggtcaacaggtactagggcaggttggtgctacctcacatatcaacatctatcaagggacagagagctgcctaccagggactcaggacaacagcagccagccatcaagcatggcagctatcaggggctaccagccctgtgccagctatgggggtaacaggcgtcaggcaatgccaaggggcaacctcactctgcaacaaggacagctcagtgacatgagtcagagcagcagggtgaacagcatcaaaatggaggcacaaggtcagtcccagcagctctgctctaccgtgcagaattattccggtcagttctatgaccaaaccatgggcttcagtcagcaagacaggaaagctggctcgttctccctctcagatgccaactgcctgctccaagggaatggcactgaaaactctgagttactctccccaggtgctaaccaggtaacaagcacagttgacagctttgagagtcatgacctagaaggtgtgcagattgattttgatgccatcatagatgatggggaccataccagcctaatgtcaggggccttgagcccaagtattattcagaacctttcccacagctcctcccgtctcaccactccgcgggcatccctcccattcccatccctatccatgggcaccaccaacatggctatcggggatatgagttctttgctgacctcccttgcagaagaaagcaagttccttgcagttatgcagtaggcggtaggcaaggaggaccacaaacacaaagactgaaatgacttgggatttttttttcttttttaagttctgtgtgtattttagcaatctcatctcacctgattgggatgtgtctcaagtatattccttttatggaaaaggactctgaaaaaccctaaggtattctaggggaggaactgtcttccatttcag

SEQ ID NO: 1076 - protein, 1567 aa, Mus musculus
MEAQAHSSTATERKKAENSIGKCPTRTDVSEKAVASSTTSNEDESPGQIYHRERRNAITMQPQSVQQKISEEPSTSSDERASLIKKEIHGSLPHLAEPSLPYRGTVFAMDPRNGYMEPHYHPPHLFPAFHPPVPIDARHHEGRYHYDPSPIPPLHVPSALSSSPTYPDLPFIRISPHRNPTAASESPFSPPHPYINPYMDYIRSLHSSPSLSMISARLSPTDAPHAGVSPAEYYHQMALLTGQRSPYADILPSAATAGAGAIHMEYLHAMDSTRFPSPRLSARPSRKRTLSISPLSDHSFDLQTMIRTSPNSLVTILNNSRSSSSASGSYGHLSASAISPALSFTYPSAPVSLHMHQQILSRQQSLGSAFGHSPPLIHPAPTFPTQRPIPGIPTVLNPVQVSSGPSESSQSKPTSESAVSSTGDPMHNKRSKIKPDEDLPSPGSRGQQEQPEGTTLVKEEADKDESKQEPEVIYETNCHWEGCTREFDTQDQLVHHINNDHIHGEKKEFVCRWLDCSREQKPFKAQYMLVVHMRRHTGEKPHKCTFEGCTKAYSRLENLKTHLRSHTGEKPYVCEHEGCNKAFSNASDRAKHQNRTHSNEKPYVCKIPGCTKRYTDPSSLRKHVKTVHGPEAHVTKKQRGDMHPRPPPPRDSGSHSQSRSPGRPTQGAFGEQKELSNTTSKREECLQVKTVKAEKPMTSQPSPGGQSSCSSQQSPISNYSNSGLELPLTDGGSVADLSAIDETPIMDSTISTATTALQARRNPAGTKWMEHIKLERLKQVNGMFPRLNPILPSKAPAVSPLIGNGTQSNNNYSSGGPGTLLPSRSDLSGVDFTVLNTLNRRDSNTSTISSAYLSSRRSSGISPCFSSRRSSEASQAEGRPQNVSVADSYDPISTDASRRSSEASQGDGLPSLLSLTPVQQYRLKAKYAAATGGPPPTPLPHMERLSLKTKMALLGEGRDSGVTLPPVHPPRRCSDGGGHYGRHLMPHDANSVRRASDPVRTVSENMSLARVQRFSSLNSFNPPNLPPSVEKRSLVLQNYTRQESSQPRYFQDCPPSITENVEALTMDADANLNDEDLLPDDVVQYLNSQNQTGYGQQLQSGISEDSKVAHEPEDLDLAGLPDSHVGQEYPALEQPCSEGSKTDLPIQWNEVSSGTSDLSSSKLKCGQQRPSAQQPRGFGNNMVVHPHNLWKVGTGPAGGYQTLGENSSTYNGPEHFAIHSGDGLGTNGNTFHEQPFKTQQYGSQLNRQPLTSSALDHACGTGIQGSKLKGNSLQENGGLLDFSLSVAPNELAGNTVNGMQTQDQMGQGYIAHQLLSGSMQHQGPSRPGQQVLGQVGATSHINIYQGTESCLPGTQDNSSQPSSMAAIRGYQPCASYGGNRRQAMPRGNLTLQQGQLSDMSQSSRVNSIKMEAQGQSQQLCSTVQNYSGQFYDQTMGFSQQDRKAGSFSLSDANCLLQGNGTENSELLSPGANQVTSTVDSFESHDLEGVQIDFDAIIDDGDHTSLMSGALSPSIIQNLSHSSSRLTTPRASLPFPSLSMGTTNMAIGDMSSLLTSLAEESKFLAVMQ

SEQ ID NO: 1077 - DNA, 295015 bp, Homo sapiens
actgcatctatctctaaactttgaaaagccagacattaggcctgcccctgtacaaccggcttaatggaaccaccacattcaaaggctgtgattacggactgccttgccttgttcagggtgttggcacataaaagactgcagtgcatataaacccattctcagaaggtgtcaaggatttcacaaacttttttcagagagtcccagcagaaaggatatcgtccctcaaaaaaaaaaaaaaaaaaaaaaaaaaaaaagattctatcatccaatgagcctttaactcccaaggactaaacatttaccaaccgccgaaaataacagcttcaacagttttgggactgccataaagatattatttagagacaggaacataaccttggagattcccttggttgcaagtcatgagtccaatgtagtgttttgttttgttttgttttgttttgtttttctgtatgtacagttctgctcttttaaaaacaatacagcttcatgatatggccagtcattcttgccctcttaggagtgtatatgcagtgctcagagacatccttgcctagtagaaagaaagcatacaattgctaacatgtaaataaatgagaacaaaaaaactttcacatatgagtttattcccccacatcattcctgcatacagagtatgttgggagagagttaaaactgggaagattgaaaagcagtgtccaaacccaggagttgggtttggctgaaccctatgaacatgtcaggggtgggcagatatctgggcctggcagcatgactgtccattcccctgtcaagggtaatgggcatggcatagtctttctactccaggcacatggatctcagggatttagagtttatgaaatccacagcagcatgttatcgtgtgtttgaatgcacaactgcagaaccacatgaggtggaagttggtaagggaggagctgagagtgagaagagggtgcctagcacagtggtctttcagagtttcctgcagtgggcctctgtccaaggcaattcaacccaaacttgagagcaatttttctggatctctgaggtgacctgtatgccacacaaccctccagtttctatttgagaagaatatttagcttcatttccttatggtctatctcccctcatggtttcctttttttttttccttttctttcttttttctctctttctttctctgtttctttcatttaacaaatgtttgttgcgatcctatcctggaactactctaagtatctttaaaataaggggtgatgaaatcaagttgattgcctatgtgcctggcatagaataagtattattatatttaattctctaaattattttataagatacatctttttgttttgttttgtttttgtttttgttttttgagacagagtcttgctctgtcacccaggctggagtgcagtggtgtgacctcagctcactgcaacctccatctcccgggttcaagcaattctcctgcctcagcctccctagtagctgggactaaaggtgcttgccaccaagcctggctaatttttttgtattttttagtacaggcagggtttcactgtgttagccaggatggtctcgaactcctgacctcatgatccacccgcctcagcctcccaaagtaagcctgggattacaggcatgagaaggtagatcttaaaattccattttacctgtgaggaaactgcagctaggaatggttttgtcatttgcccaaaaatatatgactgagaagcggcaaaagtaaaatttactgtgattctgtgattacaggctgtactgtaatactgtgattacaggctttgttgtcaacactgagctgaatcttaagggccagggagcttccatactgacttgacagcaaggtggatggactaaatactttccttccactatcgccatcactgagatcttctgcaaatgggataagaatgggaaggcccagtccagcataaaccagtacagccttttgtgaaggctcctggaaagcaagctggagctgagtttatgattctgggacgtgagtcatttcccttgggaaacacaagtctccttgcccattcctgctccagaacatggtacaattgacaatatttttaaaagtctctaaaaactcctaaaaccttgtctttaatagaagacctattgtaaaaggtgccttgtccaagtgaaagccttctctttgggcttgagaaatatgcaggagtttaattactgaccaagtctctcttatttgggcaagcttgaatgaattcttcatggctgggatccttccttgggaaactaactttgatggctatctacccagcacctttccaatcaacactgtgattattttactttttttttttttaaaggtgttttattctgactttctgatgtagccttccgataaggccagaatctggataatccaggctaactaaccgctttttggccttaattgcctggcccatacaaagataatttactcaattctccacttcatttttcatgtgtagatgaagtctgactgtagttgctcaggcactattaattcaagttaacaagcaacgaaggctgcaataaatttgtatttcaggctcaactttgattttacttacaaacttcatacaaaagtgctggttggcatgcctgtctctgaaatgtgctctataggaaggcactacatgtaaacttgtatccttatgttctaaaacatatccaattttggtagagcttaagaagttagcagaatgaattttttttcattgttatttcaaataaaaagtaagtggaatatgtgtttctctggatggtatctacaagaaactaatttctcttgggggagaaattggactcccaagaaccctctgtaagaaatagtctcctaaaataatctggtgcctttgtatatttcagtagaaagaactagtcaaaatctgctgggtgcagtggctttcgcctgtaatcccagcactttgggaggccaaggtgggcagatcacctgaggtcagaagttcgagaccagcctggccaacatggtaaaaccccgtctctactaaaaatataaaaattagctgggtgtggtggcacgtgcctgtaatcccagctactcgggaggctgaggcaggaaaattggttgaacccgggaggtggaagtttcagtgagtggagattgcaccactaccctccagcctgggcaacagagcaagactctgtctcaaacaacaacaacaacaacaaaagaatgagtcaaaatcaatcacactttcacaggtgaggcagagcacagacataaatctccacatctcaagcatcctacttactgtgtgtgaaaacgttgtgaatgttaacatggggctcagctggtttaaaaaaagtagagagaaagaagaaacttgctttccttggcatctactaatccggatagtagatccactcctttatttacaccatctcactttctttttaaatcacaatgactctgtgagatgaatatcgttatctccaattcacagatgggcaaactgagtgaattgatttagcaaagtgacaaagctagtaatgatggagaaatgatttaaatccaggcctgttctcttttatatgcatctgatcaatattaaagcaccaaagaagtgaggctactagtcactatcataaaaagcagaactgtatgctacacacaatggacaaagagagagctacaggtggagagatagacaaactcccacctaccaaattctctgtataatttgtgctacttttcctagtcatgctggaccatgaaagggatgctagagtaacaaaggtatagaaaccatcactggcccttggctccacgctattggaatcttgtgcctccgagatcctatgtccttcctttcccttgctaggagtctctttggtgttcactaaagttctcgcatggacactgtaagctctttaccagttcacctggtcttgactggctttgctgtagttttttctggaaggtgatcatttttcctgttatcattcatgttaacctctccctctgatctcagagctcctcctgtgaataccacagaggttggggaatgcccttttcccaggggtactgtggttcccaagctcatgaccactgcttcttgtctttccttgaaatatcccaaactctccattatattcccaggtgggtggcccccattttctccatctcttttgtaacaaaatagaggaggttgtattcaccaaaattcctcataagaattccttatagtttttggaaaaaaataaattcacaagcttctaggtgtggggacaaggtgactaggggtgaaacttaaaagacaagatcaactagtacaagatgctgtaaaccatcttctaaggaagatgggtcctgctaactggagggctctttgtttttctgcatactggaatctctcagaacacaaggtttggcaggacagatatgaattgctctgcctaagggaagagaagtcagtggggttgggcactgaatagaaggacagtgtaaataaaaatatccctacgggggcatgactagagaaggacaaaggacagacattctagtggggaatgtcggagctatttgctgtgatgtgtttgatgtcacatcctctcctttataggctgttttcggaaagatttggtaaaacctgcagtttatgtaagtggattgtttagggcaaaggtagcaaacctacgtttccaggagtgaggcaagttatgtaaacaagtgatgctgcaagtataaggctgtagggagtggtagcgactgtggccaaatgaggagtacaggcttcacctgaaggcatgcaaaatttactggtgcatatcaaattaacatgcattggcagatgacatttgccctacagaccactgcttgttacccagctttaagaaaactcaaagaaagacagaacattgctgccaggtggataagagatggtcatgaaggtagtggagaggcctcagagggatagaagagacaggtgaaaccaccaggtcacataaataagttcctagggaaggaaggagagacctcaagaaaacactggttactgaagtgtttggtttgagacaactgagagaaaattattttatttagaaaaagcgggatacagaaaatcatctctaggctgcctaaatgatgagtaaaatccaccatgctcacctcatgcccgctgtgagcgagtttccagaagagcaggcaaggatctgagtatagggtatgggtcaatgtcacacagcatccacaggggctctgaaatttgcagaaatccaaagagagggttttagatcttcccaacttgtgggattggcggaggtccaagccaattatagctacatctccaaggtgaagagggacacagcagacatctgggttacatttataatcccaatgttccaggaagatggaagaacaagttacgcgggtgctgagtgagagaccccaagaagggccccgtgtgcgatgcacttaaaagtattctccttcctggcagctggccagtcagcgtggggaggctcaggcccaaccactcttcaccagagtgtttcctttcccaaggcactcctgagagattcatgtggccagggatctacctttgttccctagtactttccttacatgcaggctggctggcaaagtgtgtgcagaacacgcaaaatcaccaggacccaggaaagcagagtgggcaggaggaaacctagagaggtgagcctggccaaggggaatatcggatccacttgggaaaggtcattattttctgggaatgcaaactctcagattgattatgaaaatgcagctgcctctggccaccttcctcggttgcctaaagaaactttgtatgaagtgtgaataaagtggagccgaaagatgaaaacagaacccagtagacgttattggagcccctagatcctgttttgcctaaagcatgcctacatgtttctggacttttttgtcaataaaaacagccacccaatccctctgaagtttaacttaagtcaattggaggtggaattttgtcccatgcaacttgaagtttattagtacacatggactatcctcctggaattttccaataattaactgggtgctactgtgcagggagatggaagaactgccatggtaagtgaggggagaaaagtatttgtataacatcggcccatggtaggaatcagaggagcacgtgaagtttgtttccaggttcatcctttgttctctctcttgcgtatccttcattcctctcccactatcttttgcagtgttgttaggagttgaattatgtcccccagaagaaaatgttgaagttctaaccctaggaacctcagaatatgatcttggaaacaggcttgttgcagatgtaattagttaagatgaggtcattctggagtagggtgggtctctaacagaatataactcgtgcttttataagaagagaagccagagacaaagggagaatgccatatgaggacagaggtggagactgaaagggagaagctgcaagccacgggacacccagattgacagccaccaccagaagccagtaagaggcaagggagaaatttctcttccaggtttcagagggagtgtggccctgcaagacaccttacttttggacttcaagcctctagaaactataggacaatacatgtctgtcctttaagccatccagtttttggtactttgttaccatggccctagaaaacaaatgcaagtatcttcaagtatctcctacttcactgttgcaacaacaagaaagaaagtctgtcttaaaagcttaactattctgaggacttactatattaaaatttcttaagatatctgcatttgaaaagagaactgatgagagatggcaataagtcaatctatgatagaatttcagacatcaaggaagggcagtgcacagaatcctgtaagtctcttagtgctgtgtatcactacaaacaaaggttgtagcattgtctttctgggtgtctttgggtttttacagatgtctcaggagcaactgcaggaaagggaaagagagaaaggcttagggggattgggctccgagacctcactccaatttcaaccataataactcttctatattttgggattctacgtaagatttaatttggaaagcgttctggtgttaacacagagagaaagtcactgcattatgacattatttaacccacactcaggcaaagtgggttttttacccctccactgtttctgcaaaatgtgcctacttatatgtatgggtttaccattaaagcagagttggacacataagagacacagcattattcttcctcttttttgtttagctattgtgacgggcatagggggaaagattagctgcttttgctttgttcttgtcttttaagaactgaaaaatcaagatcttcatgattcaaaatgtgctataagactgaagtaagagtcgaaatatctagtttattctattatttgatgatttattggctgtctttctttgtatttattttttgccattgggtgaacagagtaggctatcaggatgtactatttgtattcatgtgattgaggcagaagcagtacatgaatactaaaaacaattgtaactgatgctgggagtatataaaggaaagagtggcttgcaattctcttcaattgtaaaagcataattcttacacacttgtagccctctatacttttccatgtatttctcattggaaaccctcagccatcctgggaggtacgcgacctggcactcctaacactatcccctagatgggctcagagcctatggaggctcagagaatcctcccaggcctgaggccagttagtgagcgcggagatggggctgccacagggcttctgagtctcgtgctctctgcgatgagtcagtggtgttttgttttttcctgagccgtgaggtcgagggaaatcttaaaacaaatggctaactagggcctttagccccaccttacctccaccacttccaccataaaaccttaagtctgtctctgcacttgtcatgtcattgtgacaaggaaggagtcccaagaaacaaacaatgaataccaccctcaatttcgttaaaagattcttcagttaagcatttgaatctcaaaatgctcttcaaattctaatagctcatcattcatccacccacactcttccttcagtcaagacacttggcggcaacgccacacaagcaacccggagctccggggcacttctggctgggtggacccggcttaaccagaaagaggggatgttggaatgtcacaggggctttcttttctttctttttcttcctgtgtttccccccgagaactccttttttaagttacatgtccaggttggatatattaaaatgacgcagatgaacaaggactggatggtcgaggaaggaggccaaataacttttactagcatgggcctctgaaaatgaagcagggacagagacactttgtagctcaaggaaaagcggcacgttagagaccaggctccaagcctggggtctttgtttttgtgtcttttataaagtggcccatagggacagcaggctgtgtggtgggagctcctcctcgcttcgcggatttggccccgagggcagacgagtccggtggagagaaaaaccctgaacttccaaaggcatcatcccgcgagagggagtttcggggatggcttggggaaaatgtaaaacaaggagatggggagccaaggatggggggcggtggtaatcagagaagccttaaaagaataaaggggagtccagcccttgagcaagagtgagaaagagaggctgggtgggagaagatgggagcagacaggacgcagcacgagtgccagggcgcgcatttggggggtgtcctggcggtgtggagagagaagagagagggcgcgggtgacatcacgcccgggcccccttcccctcgccgggtgggtggggcttcggcgcgccgggagggcgcggggtcaagtagggggaagaggaggagcaggcatgaatgtgtctgtgtgaagaccggggaggggcggaggaggaggaggaggaggagaaggaggaggaggaggaggaggcggcggcggcggcggcggcggcggcggagggcggggagggagcgcgcgcgtggctcgcggcgcccgggctcccccccagcccccgaccccggcccgcgacgcgccgcctcccagccgccgccgcccgcctcgcagctgggacccactccgggcttggggacccggcgggcgggagaagcgggggctcccggcgcggcctggaaggagcgagaaagcaaaagtaaggcgagcagcactccaagttttcccaacttcgccccctgcggcggcaggcgtcctgctgctcagcgcgtcccctccgagcccgagagtggctgaaagaaaagggactgggcgggggccggggcggaggaagagagagtgcgagggagcgaggagagtccggcaacatctgttaaaacttgggggaggaggagcgcggggaggaggaggaagaggaggagagaagggaaggagggagcgcgcgggaggggagcgcggagccgagggacaacttttccaccccgtgagtagtgcaggcggtgccaggtcggggcggggggcttctccacccagcacggggcaccaggccgggatgggacctttttccagaaagtcgattggatgccaggagaggcgtacggctgggggtttctttctttctctttcccctccctcccgcggttgaaccaaatcagaactgtcactcagggcttgtgagtcagaagggatcggattacacgatccccgaaactgatgccggagctgcacgagcgggagggagcgggcaggggcagcgccaccggcgcgctcgcacactcgcactcgcgcacacccgccgctcccactcacccgcgccgctctcccgccttccccgcgcgccccgcggccgcccgcgccgcaccatgcccgcggcgggcgcaccccgcgcccagcccggccgctcgcggtagccgtagccgcccgcggccgcgcggagcggggagccgccagcctgcgccccgtccgcgggtctatgggaagttcggggacttgacagccgctgccgccgcaggtacgtcccgctcgaagttctttgtttcgcggaccccgcagcccgctcctgcggccgcgcccgcgcctccggggccagaggtggtccccagcgtggggacgggatggagtgaaaatggctgtcaaaaggcgcccagatttagagagccgccggtgaggcgtccgagcaaggcttgcattcgctccctcctcctggaaggtcctttccgaagagtccgacccgccgaccggccggagacggattggagaatttcacctcccggaggggggacgaagtttgccgcagtggtggcggcgcccctcgcctccgcccccatccaaagggttcagaagaactccgcgagccccgcacgcgcctggctccttcctttgcgcggtggcgctctacggctcgggcttcgggcgcgcacggcgctcgggatgggcggaaggaggcgggaggcatggtgggtgcgcgcggggacctccgccgcgggggccgccgccgctggggcttctccagcccgggctatgcttcggagggcgggggtgtggtgtgagcggatggagagaggcgcgccttcgtcgtcatagaggaaaagtgaaagttgtaccatctgtatatgatttgggattctcttatttcttttcctttccaggggcagcgcgcacagacacacaaagtaaccgtggtccatgcaataatcatttaaggtgccgcgtttacacagagcagcaggggacagttactttcttgagtagcagcgggaaaacgggcgggagaaggcagagagggtgtaaatattgatcccaaacttgcagagtttgtgaagcgacttttaagcagattgtccgaagcggacgctccaccccgcacccggccttttatcctttcctgaactttgtgctcctgtcccccattgcacctccttctgtaagatgccgtcccccgagaggcgctgcaccccaggcttccctgcctgaccccgcgtggaaagaggattaaggaggctccctccgccgctggtcatcctgccccaacttctcatctccccagtgcagactgccgggtagattctggccttgggtacagtgctcatggccctctgccagtttatatgtacatatatttatgtaaaacattttctcccagctctttgccagctgttccacattttccagctgccacttcagtttgaaatgatggactgtctgcgtctccaagtcaaagaaccctttagtcaaaggtatggagggccggccgctgtgcaaatacatggcagtgccattagccgggctggtattattagttctaaaaaatacctcctgctccccttttcctctcctccctcttctctccagttaggctttccagagcacagtatatacactttgctgaaaattcgagtaattaggcctttccctcttaaatgtgatttttgtacagaatttggatgaggccgtttttttagatccctgaaatatgtgtctggtggaaataaattaacttttaaaaataaaagagtttcagcttgagcgcattgggcatggcgggtggggggcctgcaccctggccgtctgaaatgagctcttttcagtctatttaaggcaggaaccattcatcctccccatgctacactttttgtgttgtttgatgtcttagcatattatagaccgaaatctacaagaattgacctaaagtattaattttgagtatttatgtaattgctcggtaattttgaataggtgccttattgattgattcctgtaattatttcatttaggttttagattaaaaattaatagtagtctgacagtttcttaattacatgtgtcaagattcttttgaaggaggaaaatgctatgttttaaaatagtgaaatagcctcaaaatctcttaatttttctaaagcagaacagtatttcagttgaggggatatattaaagctgccgggactggttttaacaatgtaaactctgtgaagtatctgaagaatttgtttatgttaggaaatattggtcttaacgacctggtacacaaacactttggccagttaaactatattcaaacctaaaacaaacatgaaataacatttaaattagttgtaatagcatgcttatacagagtagagagtttattttatactaaaagctatttaattagaaactccccgcctaaggggagatcctttcagggtatgcaattcttaaagtcagcctagggaagctttggtttaagatgcatgaatgagtccaatgtgagaggtgtctagtgaaatttcacacaagcagaaacactttaaagatatagattgtattattgttagtaggctggtaggtccaactcagatgcctaccaattcccagtgcctttaacatgcttgtgttccttgactgaaccttgatataaacacatttctattgtatatctaatttgcaaaggaccatagacagaaatgagaaaattcaatactgatgaaaaatggctctgtagagttatttcattaattatttaatgaaagaattgttaatttatcaattcgatgtgcaagcctaaaagttggactttcctttgtttcttggccagtgaagtttccttaattacctgcatgctgtaagcatttcagacttcctctgtgcttagccatttagaggtccttcctcctatgtaaggtatcctgcttactgagacctcttctccccctccattttttgaggatagagtttgggagcttatgaaaagaaacaatttaatgatcattgttgcatgcactcacttacatggagacagtaatgtactaagaaaaaccagtcttgaaggaaaagtgaatcaatgagtcatgaaatcctcaagaaaaccttagcaatggaatgttaatgcttttagactatagtagattatcttaaaagtcagacttttcttctttatgcaattgttgtaaatccccagctaaagaattctttgaaggaggttttagttttgctggcattcatattctgaggtcggtctgatttgttttggaagattcagtaaattttctgccaacttatatcatgagaggcaattaaaatgctgaaatgactttataggacacacacacacatacacacacgtttgttaaacaaaaggttccactctaataatgacttcaggttgtcttttcattaaagcctaggagaagatactgcccttctcttcacgttgtcatttttctagatgaaaattgatctgtttctggtttcaaagcaaataaagggagacagaataaacaacaacagggcagggggtactgctgcaaactttttcaagtattttcagtgtatttttcatctttacttttatttgatgggcctgtgaaatagagctgtagactggcgaagactttaaatgaaatttcacactttgatgattttttttaaactttgatatattgacagcaaaaggagctgcaaagcttttatataacttgagcagtaacgccaagcagcagtcaaacgtctctatgcatttgtgtttaactgcagaagaaaaacatgtccatgggcagtggaggttcttatcaaccccctaatcccagatcccagcaaaccttgagggcatgcctcagatcttgctgaaatcactgtagactctcacagtttgcagattaaatatgctatgtgttcctggctccagcaacagttttatgagctcactaagcttcctgttttaagatccttttcttaagtttttaggagctgctaaaggcaatgctgtctggagtaagtggtacttgttaatttagagccactttagatatttcattctcttttttaaaaattgccataattattatttttaaattgaaaggccagtcactccagggagagggaggagagctgtttgaaagaaattgaatgttaaatgtgtttggaagtacatttgatcgcaaactttacatggtgtctcaattgttttatggcacttttcttttgcctggcccctgaaaatgagagactttttccacttgtaattctaaatgcgctatatttgagtgccaaatttcttcactactcattacctctgtgagtgtcttttggtttttttaaatgtgaaagtgttttttgttctgtgtgtatatatttcaacccgacaaaatgtctcagaaaatctatggccttctaaagaagctgaatgaaaaagccattacatagttaataaggtggctttggaacatttcagccccctcctgaaaggcaatattgtgttgagctccacatctgcatctgtggtatctatagttgtactctcatatatggcacttctgcattttgcataggagtcataattaaaaaagaaaatacttacatcattgtccaacaacatgtcatataattcccaagagaacgctagccagttttgtgcttaaaggttattcaatgaatgaaattgtgaaagcccatttgtcaaagtactgcatggtttctgttagtgttcaagccccaaattcattgtctgcccgggcccagccattagtcatcagtgtattagtgctgccttcaggccatgctgcccagcacttcttcacaccattatagctttgaaagtgtactctgtcgacttgtagaattactgctctgatttccgcttggctgggtttgaggtaagtcccctccctaccttctagctgactgtaatccttgctttcttttaaagctcctttccagagatttaggggaaaactttcttaagggccgtgttggcatcatactgtggttttgttgtggcatgcactgtacatataaattgtacctgcagtaaattggattgactgctggcctgaaacagctagaggggcttttcttttcttttttaagaggggagggggctaggtggtgggggagggtggcacaggagtacattttgaccacaagcatttgattgtgtacttctataattcttttgccacaaaattaaattaattaagtaatgggggataagtgcacttttacttaaatctttattggagtaacttcagaaggtagtgtgacattatattgcttattttcatgtggaaatttttaacttttgctactttaacttttttttttttttgaagattgcatgaaatgcctaggaaggctccagagtgctttacattacaaactattgatttgtacaaagagagactgaaaactcaccatttagatgaaagataagtttcaaattgcagtaatgaaggactgagatagttaagccctattattgatttcattttgtgatatttttaaaaagaatgattcagtctgaagaaagttagcagtgtgtagagaaatttcatccagcagcttaagattgaagccttaatgactctgatgtatggaaacctggaatccagtggccagacgtgtggagcaggccatgccacttcaggacagtgtctgctgtttgaactgtggatactacaatgaaattccatatcagagagtttcattgagagggtgtgtagtttggtgtaggttacactggcagttttgtacatgcaaggcagaaaaataagacagctaaagaattctgtctgtgaacaagcaaagtttatagggtaagtggaccatggggtaatttttactggataatccttaattataaatgcttaaattctgaaagtattgcttttaaatctgcaattaagaatcaaggatcaaaagtttaaaagttgggaggataaaatatggtaagtagtacttcacaaaaaaatgttaaatacctttgggatagctgtagatgattttaacatgcaacaggttattggtctaatatttgtgatggtttaaaagtaaattactattcatggaacatacactctactcccttatactcccttaagccttactgtaaagacacacatgattctaagaaaccaaagctacacaagttctataagaataattaaagttttttcttctgaaaatgtgtgaaaacttttaattcctataagcctcagggaagcgagacaagggacacatctgatcagtcatgatatttttgtgatatatgtggatttaagaggaatacagttttcatgagcttagctgatctatagactgataactgacttccagatctccttctctgtctgagaaggattgcctgtatccagctaaccccgtagaaagtgggggtgccagtgtgctgcacattattgctcattttttaatggcacctgctatgcatgctgcttcctgcagtgcctaaccaaggcacgtgggactcatagttttacagaactgagaaatggtaacaagtattagatggagacctcatactcccctcaaatgtttctcatcaagtacttctggcaacaggggaagagtagctgatgatcttttcttttaaatacaaatggcagaaaagtaaaactggctcacagaaatgttgtttgtgattttaactgcagtagcaatgattactttcatgtcaaataagcttttcagtggttgaagttaaatatatggatttcttaaaagtttagatagtgttaatttaccaaaaccaaattcacttaatccatagccaggcaattatttccccttagagtaatttagttccccttggagtaattccatttgggtatgtctgtcatgaatactgcttatctgtgattaggagcatcagaaatgtaggaaagaaagattgaagacactaggcagtggatttggggaaccctgagctaccaaatggcaaagcggacagatagaagctttcctatttggagttaagattctaggctttcctgattatggaaaaataatcatatatacaggtaaaataattatacatgaaaaaatggttaaaaattaatgaagatttcattaagaacttatgaagttgggctttccaccccccccccccccgcccaacccttgcagaaaaaggcaacacagacagggaagggagaggaaatgaagccttaggaatcctgggaactgctagagtgtcacaaaggttatgcatatctaattgattttgccctcagaagatattttgaacacaaggaaacatcaaccacattaaaaacctataagaggttttctgtggtgcatgaatacatgaaatccaatgaaatgtttaaaattccctgcattttgctcattgaaactcagactatttctcacttccagaattgatcaaaaagttcaaatcaacattagtttgtacttcttgattctgaaaaaaaaattctctttctaaaggatttatttatttttgagaaatgggttattaaatagctacagggaggtacatatctttaatagtagttttacctggatggttaatccgggagtagcatcttgaagtagcagttgatctactagtaatataagtatgagagcaatgtcactcttcagtgctacagggtaggttgcctcaaaaatccttatgacaagctgctttcttctggatatttaaaacagcaaataaagattattcagcttatgaaaatacaggcaggtgtaaataaatgttatttctctggaggaaaaccttcttccactggagtaatagttccctaaactacacggaataatttctcacttaaggctgagccatggtgctgttaatagcactgcctcgcctggaatgtcttctgtttctgatctcttattgccagtagctgttttaacctatcagaaacagatcgggttatcattaaataggcttttaacttagttgttttaaatcttgaaatacactaagaaaaaaaagagaagagagtttttgcccaagtttaggcaacttaaaccaactggcttagggaaataaatgaagtagtctgctgttcagggaggatgcactatcatgattgaaggatgctgttcgacttcaccctacattagaaagttgttttattcacttcaaacatcattttaaacgttggctttggcatgggtgctttatttttaaacattttagtgtttaaacgataaaggaatcctgctcccatgggggttagaggtttcactgcagagacttgaaaggagaaaagctaattttttctcatgttcccacacttgtgacttttcatattttctatttactacagaaagcctctggttgttgaggttgaacattgggactccactcagggcctccctgagctcaagacaatgaggcgatgtgtctgtcttagccattcacagcacttgaatctatgtatggcagctaatgaagaaaaacacattgggggccaggttcatagaaggtgaattcgacgttttgtgagcgaagcacacacctattggttttgtgaaggcttttcaagggatccccaatgttttattataatgcgacactcagggtggttgcattgcaaagtacctggaaggttgcagctccctgaattcagccagttaaaagagccctctgaacgcaaccagggccggcccttgccagtgtttgctggaaatttggctgggccaactgtagagtttgcaaatgcccgtgaatattccgaggagcagggtgaccactctgatacgccttgatacagaccgcttctctgcactggagggagactgccaggcgctgctggcgctggagctcacctccccacccccacatggcccccagcccttttttcacttttcccgcggcctggctggcggagatgcattgtctcccaaagccagcttcagaaatgcggatcaaagccgggcctgggagcaccccttctgcccccagacacccagagccgtctctgagcaatccagcatgttctgtttgctggcgcgctgactggggcgcgccggggccgggagaactcggcgtggacttccccgcgctgatgtaatgatgatggatgcggcgacgcggctgcagacagcgctgcgcgggcctggcgcgcccgctaatgaacccaccgcgccgccgccgcggcctgggacctcgggcaggggacgcaggcgcgggcaaaagtggtgaaaggcgtgaaaaacatcccttgccaccgtcggaggaaaccagaacctgaagggaactcgacaggaaagcgcagagaaagagcgagctttcaaacaaaattggccatacccgtacaacctgagcaaaacaattaccataatcaatggggactcgcctttgtaatggtgaaagtttctgtttgggtttccactggtcccccgccccttgcaggtctaagtgacgactctaaagaggacgacttgaggcgtctgtgtgcaagtgctgtttaatatgtaggtcccggcaagaattcgccaaggtggtaaaggttgcggttctcttgctcgctttctgttctcttgcttactttcaaatgcagacgtgcactacagcgtcaccaggtcagtggctccaggaagctttaaatgccttgtgttgtaagaggttgacgcaggttcagatttataatttagaaagaaaagacccacctgcaggcaggttgcaaataggagacggattagatttaaaatagggtctggaattaattgtgccctgggtttaggcctcggggaaattacaaaaggttcagggatagttgagtgggaaaaagccttgactgtttgctttcaggaaggaatgtttatccctccttttacctatgaaacttcaagctttaggaaggatataccattagagcaattttccttgcgttgctttttttttttttcttcaccgagctcctgggactcaaacatcagctacaaacatttttccccttaagcatgaaaagtcaaggggcatgccagcaaatcttgcatgtaatgtttcagtggtgaaagggattgaaggagaacagtgtggagtcgtaagcaaggaaactatgtcgggggaaaaagtatcatttcattcacatctgaaaaacagtggcatgttttcctcagggaaaagtctttgaagtgaagcagaacttaacgttttcccttgatgcttaagttctaaataaattatacttcattattttttaaactccaggttttaaaagtgtcgtggagctactgtcctagtggtgttttgagattccatgaggaatttctactgaccacttctatcccgaatgcttgaatggaccagctcaggagtgactttccaagctcctgactattccctgaaaattccatcaccacaactcaaagcggccaccttttgccgctcactgactcttcacccacagtttgatgaggtgtgggcgtctagaatgttaaactttcttctttataactgacagggacaaagttgtaaaataagctgatataatttataggagtgtacaggaagcagatgtctgatttggcacattgccatctttatagcccagttccaagcataaaccacacttttaaataattaggtactaactaatgagatccaaaaataagttgtcaaaatagaagggggtagattgttgagtgaccaagggcctatttttaaaaaaatccatttcagacgggggtaggaattagtattctttaagaccattaattagtgtgatttcagtcagtgcctggagctttacctcttctcacttgagcctctctctatggtgatgagcattgggagggttttattgctttgttaaaataaagtcctttgccttgggggaaaaaccaacaactccacaaaaaccaggtttgtcaaggaattttgggaacttgtctcctgattcctattaattagcaccctctgctaaggaagatacttagttcttactaggaatcccatctctgaatgggtttttttctggtgcatttgcatgtttcagtgtgcagttttaacgttgtagactctactcaaatacagccaataaaactgttatgtgtgtgtcgaagggaacaattatagcatagtaaattcttgcttatcccaatggctaagaatggagtgtttggatcaattaaatatttctgctaaagtttttagtttttatagaatttgccagttttcaacgaaacactgaatatgaaaagaaaatgtatgtagctaaaccagtggtgattgaaattcaagacgctgcagagtcctgtaagtcacagggtcattgatgcgatcatttatgtactcagtaaacattcttacgtgaactaagtgctgggaaagtagaagccttgtcctcatggagcatacagcctggaaaggggaggtggatgttcagcacagacttttccagatgaaggagagtttatcattgtgatgggtgctaggataggtttgtgtagggtgttagaattcaggattctagagtgcagttcattcattagttcatcaggtcagcaaagacttcaatgagtatatactgcactgggtatacagcagtgagcaaaaataaacgtgtagaacagttgttcaaggctcacgcctgtactcccagcactttgggaggccgaggcgggtggatcacctgaggtcaggagttcgagaccagcctggccaacatgacaaaacctcatctctagtaaaaatacaaaaaattagctgggcatggtggtgggcgcctgtaatcccagctacttgggaggctgaggcaggagaatcgcttgaagctgggaggcagaggttgcagtgagctgagatcacgccattgcactccagcctgggcaacagagtgagactctgtctcaaaagaaacaaaaccgaaaaaacaaaaacaaacaaacaaaaaaacaagctttagtgaatctgacaattagtaacgcttgctaacattgaggttccgggtgccatcctccaaggcaaatgcattgcaggaatctgaatgcttagcaagcactgtagaaacactgatacaaatggttcttgtaccaagtgagaaacaatgatgccaattgtattggattattcttgtggcatactttaaagatgatatttaaatcaattttcaaggaccattacaaaaagtaattattctgagattgttagagctagaagggaccatcaaagatttctcctttaagggttctctgtccagattcttggaaaagcttggaaggtctgtgatcccttggaaattaaatgtatacttttaagtttaagggtattttctggggagaagctctttaacttttaacaccttcttaagatgttacttcctcccgcccaaagtaaaggtcagatctcactgcccgattctgtcatttgacagatgagatcactgaggctcagcaacaggttgttggcggttgtgcactggccagctagccccagggggcgccatgcaggtagccctgcccttgggactcacgcacagtggctgcactcggaagggaaatctcaagcccccttttctgttgtataatactttgtcagtgccctttgaggggtgtctctgaatttggagtggatcttacaattgatatgtaaatttaacttagtgcttcttttttcttttttattctacaaaagctgttcttaaataacttgtgtgttttacaatgaatgacactggataatctcagaaaagagatggaagtgagtggaagagccggtgctacagtgtgccatgtggcctctggttcttaagcattctagttacttgaattccagatcaaggaggaatttattatacaatgaagagcttgcagttcccttgcaaatatgtgttaaagtagactgaaaatattttatcttgtattttaacttttagttggtcaagcagttgcttatttcatttcactaaccactgctgtgattgaggatgtcgacatttactaaatgtagaaaaataagcaagatggccagacctaagaaatgctttccatgaatgttgcaatctagataacttgaagaaaacatgctagagagggtacttttcctcttttcttgtattctttgtaggtgtagaacatgactgcaaaaaggaacatgaaccagagtgaaaattgatgaatgatgagttagggcgattatcacatgaatgaagccagtgaaagacagacctactgaacctgcctttagctgagttttgatatttcctaagtgagcccagtctttgctaaggcacctttcaacttttccatgtggaatcaagagcgtgttgttctattacctttgtcttaaaagtgtaacttaaatgaactgaaatattctcatgctttaaagaggttaaagagtatagcttaccagaatgaattaggattaagaggtatattgcaattcagatatctttatgaaagaggcaaaaatcactgactacttggcctgaattatcctctgattcagaatttggagtaggccttcgatgttagaaattgtcggactctctttaaaacatctaattaataattaaaaaccttccctccctttggaatttgttcaaatgccccttcctgtaaagttggccacctgaagagacatttgcagacgtggctttaaaaagtaatgtgacacttgtttcacatgatagacacagttgcaaattgagatttttataccgtttgataccaaacgctcagtagggatttgggaaaagtaccatgttatgggcatttccctcggttctcttttttgcttgtgtagagtttcactggtttgttaaattttgagactttttttttgccagaaaacctgtggagaagtgtcatccacattttgaatttcctaaagctctaggcttttctcagatgacaggtgaagtggacttttgaaagttttttttttttttccaccattttggaaagttgatggctctgttgttttctttagggcatttttggtcgaagagagctgaagtaatgagaagacatcatggaggcccagtcccacagctccacgaccactgaaaagaaaaaagttgagaattccatagtgaagtgctccactcgaacagatgtgagcgagaaagccgttgcctccagcaccacttctaatggtgagcagcacagggattaccagcagcccagcctggagtcatttctgtgttctctgcattccttgtgaattgagcgtttgcacctggaccagtgtttgttctaggagacgctaaagaaagcaaatggagcaggggcggggggacggcggggggacatggaatgtagtaatctctattttggcactcaacctacacgttgacttccaaactttctaatttgagatgtaaatgtgataggttatttattatcagaagttcctgttttggcattttggaaatcatcttgactagtctggcaagagttcaaaatgctttgtgttgcatatggatcatctacactactcggaataattagtacaaaagacacaaaagttgtcttgtcaaaattagtgacaggacagcagtctcctccaaccccaactttaagtagtctactttaaaggattttaagaattgttaatgactgaacctcaaggtaatgttagtatctgagatgcaggttttgttgttagcttataaaaatttaatttacttatttgtgttcagagataacacagagccactgtttctgtattctgtgtttttaaagtttaagcaaagtgttgagaggcatttcagttcaagcatggagtgttgaaaataaattccagagcctccctggtacaaacagactgaatatgttaatggtaaccttcacttcctgtccctgctgtttctccattgtgggccactaatgcctttcctttttgtagatttcatagccattcttggcctccctgaatttctctgcttttccatgggcctttaggaagaatgagctggcccgttttcctcgttcctggacactgcctatctgggcacactgatttgtatgagccaacctgctattcttatattttctatattccaagacaggttttacttgattgatttacaagtttttacatccacctagagagtcagaatctcctttggaaggtaactgcagtccagaacattagactctaagggcatatacttccaagcagcctggccacttctctctgggtccctccatgtctgctgagagcctgtgcttctcacctgcacttcttcacccggtttcatgagtgtgctttgctgactgtactgggtagggaaggagctggctcttaaacctgctggcaaatgacttcagttttaaattgatcctgagggagatatatttacgtctgagttaaaataatgaatttacatatatgtgaaaatatttcctcctttattgatggtatttaaagtcaagactggagcttattttaattgagccagaatatttgcatttttcatccaatgtggttatagaaggcatttctccttagaaatatgttaccttggtttcttttttctggaattggtaaaatttaggcaaatttattatttcagaaatagaatcagtatatgcagtgttggttatttggtaatttttatggtaattctgtcggaataaatgcttcctatgtacttggcttcaggaacatcagcttttggttatctttatagtttgcgtgagtgcacatgcctgtgtgtgagggtgtgagtgagtgtgagtgtgtgaggatatgtgtgagtgtaggcaaatgtatgcgtgagtgtgtaggtgtgtgggtgtgggtggtagaggtaactatgagtgtgcatgcgtgtgagcatgcatatgtgtgaatgtgagaacaggcaagaacaagtgcatggcagaagatgttgctgcactgcatggagcctgcagaagcgcctgtcctgtttgtcaatctcagctgcatggccacagagtctcattcttatgaagatgctgttgtttgtgccactaccacacctggacacattctcaggaggtcttccactgcagctgcatttgtcttgagttgctcttggacctcgggtttccctcatgattctgttgagggtgattgggaacagaactaatctgaccagccccacaacaaccagaaagccacgagataaaactagccagagaaggagcagtcatgatttacaaatgtttgtgctgcagtgttaaataatcacctgtttcctcaaccacactcccctggctttctgccctgatcagcttgtgcccttgagcccacattttctcctaaatgtgtatgaatcctgtcctgtttggggaccgacattgattggtcaaacttgcagggcacatgcctgagtgatagctgtcctagaaatctggcgaactctggccagtttttcagtgttcctgtttcttctaagagatttactgttttatattttgggacaaaaatcaaataaaagaaaaatggaagtggtgtttttaaacatggattgcaagccgacaggcagattcttggaaaacaaataaatctaaagagaggaacaagtaaaagaaaggacaataaaccctttctttgtgtatgtgatgctaataattaccatggtcttttttacagagtcctctacagttttcatctaactagttcagagcctttttacagtcccaggattatgctgaggggcgtggattgctggaagcgcagaggccctttcttctgcaacctggtcacctgctgcctctgcactcagtcttgatcacagggactggtgtgtgggctttggacctggccctgtctgggtttagagctcgtggggtgcaggatttccaagttgggacactattcgtgtgctggctggtggttgacatcgccatggccctccatccttctgtccatccatctgtccctctgtccctcttcctatcttttctctttttctctatgaatatttcataaatgcttggacccctgcactgacgctattcgtagaaaggaaaacagaatcatatggatgctataacaggtagtttgattgctactgtttccagaaaggttcttgtgctttctttaacaaagccctgaactatatccatttataactgaacaattaaaaatgagttcagtttcggccaggcccggtggctcacacctgtaatcccagcactttggcaggccgaggcgggcggatcaccaggtcaggagatcgagaccatcctggctaacgcggtgaaaccccgtctctactaaaaatataaaaaattagctgggcgtgtggcgggtgcctgtagtcccagccactcgggaggctgaggcaggagaatggcgtgaattcgggaggtggagcttacagtgagccaagatcgtgccactgcactccagcctgggcgacagaacgagactctgtctcaaaaaaaaaaaaaaaaaagagttcagtttcaaaaaccaaatgaatgtgatacctgcattttctctcctatccaccatttcatgattaaaatcacacaaatgaacaaaaagttttgttactggctgagttattggtgaggttgctttaattaacttttccagccattctgtggtgcaatttgttcttcattgtgagcttcccagccaaaccactcacattccactgcatgtccttgcagatctgttttcgtacttttctcagctgagtatctgctcctggaataacatgcgtatagagttttgtttaaacatacgcagacccacaaccaaaaggtacagttcagaaaacttgaacagctttttaaagaagcatttgccacttaacactgaaatttaaaataatgcaagtgaaaaactgtgttgtagatcttgtatgacaaaaaaaaaaggcaagtcaaatttgatttttgtaacatttaggaacctatatcaacatataaagcctttggtaatctttatgcaggaagtacagtgtacccgtagtttcatgtgcccatagtctgattttaaattttattgttatatttgaagtgtaaatgacgaaggagatgacatttagttttctgaattatttaaatgcaattgtggtttaagtgatcatttgtggcatttcacatattggctttcccatagaaagtatgcatgcagatcttaggtataattgttgactttaaaatgtccaagtccattaatgtgtgaagactgtaagtaaaatgccttaataatctctttttgatgtagatgcattacttcataagctacatgttgtgttttctaaataataagagtttttttcatctaaatcttccaatgttctacatgttctcattctcttataaaatttttttcaacaatttgcaaatactgacttttcaatttgaagtgttttgcctcatttttggcccatgatttcgttttaaaggagtaattcgatagttcttattaatctgcaactcggctttaaaaaagaaactaatgataaacgtatgtaggctgtggtcttggggatcttttatcagatctgatagttattgggaacatactttaaagtgatagaaagcagaaattattatcctaacgctgatgcaatgtgaaaccaaagttgatagattaatgatgcaaaggaagttccctgttcactttgattctttcaaaaacaagaatttggttctttgcttaaaaaattattttcttcaaggttggtaaggggaaagtgttatggtctgcaaattcctaaggagttgcttttttttttgctttaacttttggtcacttcttggccttgcaatttgcttttaaattgtccattgcatgggtgttgttaggttggtgcaaaagtaattgcggtttttgcctttaaaagtaatgacaaaaaccgcaattacttttgcaccaaccactgattgtgatgtctgttggtcttctagctgggagtcagatggctttgagttttgttggaagtttgaaatttatctgctattcttcaccataagctcttgtctccttgacttttttttaatggtaagagtatatgtgccagttctgctctgaaatgggcaggcagttcacgccataaagaacataggttgtgagttttcggtttcttgtttctatagaggtccaaccctttttctttgccacatcccatttcctggcacatgacagatacgtggaaaggatgttcagataaaatggatttcagatcataggatgttcatttgtagcacacacaggttctgggatctgaaagcttggtttgagttctggcaacacgaaggactagccatgtgagtgtgagcagattaacttttcagcgttctagtttcctcatcagtttcggaagacaatagtaagacctacttcacacttcacaggctgccgtatcataaacatataggaaggactctgcaaacgttagcctctgctattaggacaaagcatgttggtgagttaaacgttatgaatccaaaacaaaaagattctgttttcttgaacatacacgtcagttttcaaattaagggaaatatgtttgccaaaagtaatggtgaatttgctggactcagatgtctgaaaaacagttcaagatgtttcacaaatcccaaatgtgactaagtttgcacatcttaaggagggatggattaaaaaaaacaaagtttctgtaaacttccttgtaaatgccttcttaaatcggaaaatagggaagataatcttgggaaaatttatttcagtttcctcaaccttgaaagctagtgttgtactgattatatgctattgcattagaagcagcatatatacatcctttttcttgattcttttcctgggttgaactggtggtttgtgctgtattcgaattagattttattttttatagagagtttttatgtttctaaaccaactaactgatgacaaatattctgattctaataagagccccgactctcttgagctccaaactcacatgtcctgaactctggttaccactgtgttctttattttggctaagtatatcacctttcctgtggtcagccaggcttgaaaccgcaccatcacctttgacccctccttctctcctgctcccatgtcctaccggttttgaggtcctgttagattttcctctgtaattactcgctcgtgtgtctcttcaggccaacctactgtactgtgtggtgaaaaccctcacacctcatgcttagatgattaaaatgaccctctgtctaatcaccttgcctttcatctccactcttgtcacgcatgggacttgctcctgccaaattaggcttattacagttctgcttatgccacaaccctgctctaaaagctccagtgactcccagctacttgtagaataaagctcaaagtctttgacttaacatttagatatcttctaaaatctggccccagtctgacagtccaatctgatatgttcagaagtagatatgctactatcccatcgcataacctatgctttagctaaatgcaagggctcttggcctcttgtccatagaaatgttttgctaacaccaatgcatgtttaaattctcaaatgtgaatatgtccccagtctctttctctcctcataaggtcttgtgtcctttggggaactagcttataacactagatttttttatttttaaaattattattattttaagtaatagacttcatgttttagagaggttttaggtttacagaaaaattgagcagaagacacagagagttctcatataccccgtcatacatactttcccctcttattaacatcttacattaatgtggtacatttgttacaactgatgaaccaatattgatgcactgttattaactttccatcattcacatgggggctcactctgttgtacagttgtatgggttttgacaaatgtatgtcacatatccaccactgcagtatgctacagaatactttgaatgctctaaagatccctcatgctccaccagtttatcctgtcccttccttcacagcactcaagttttacattttagttaaacttcttgagagtagcacctggtttttctaccttacccgctccctgctcacattcagtgtgtttgctgagagggcctcagcagatactgaataaacctgcaaattacaacactttgagacaggagggcaggggacatgtgtaacagcattagtgttgtgcagttagaagccagggtttgagccctatccctaccacgtaattgctgtgtgatcatgggctaagtacttaacctgtctgactctggcacagagagtacccaaacatgttagctattgatagtaatagtaatatgactcttatgggtataatttgccaggattaaatttattgatgcatttcatctcactcctttcagcataacatcagttgttagtattctctgaatggttcggctttagtctgattgaggattggctaattgaggattgaggattgaaggattggctaataggagatccttacatgaggttggttatcaggttctagcttaacaggctagagttagggaacaatatcttaaatcactggtcctgaaattggcacaagttgggattttagctattggatttctcctcaaaaagaacaattcctgggataaatgaatatcagataaatcaggaataaatatcactcccatttttcaaatttaagagcaaaaagaagtcacagcatgatgttttgcttggatgggatgtttctgggttgcctttgattacatgtgatcatggggtgtgaacatttcaaatttccagaaacaagctgctcagaaccagaaacaaccaccaaatagtggatgcttaagcggcgaaatggtgatgatgggaggaaaatctccctctggagaggtagttggtggcctcccaccacctcctgctctgacccccaaggtcgaggagggcttgcttttccaggcagctttggggagactgggtgatagtaaaagcaaaaaactccctgttaccttgtttacatagaaacgtttccagatatgtctgctttagtttattatttggtaaaattcacatacagtaagattcactctttgtggtgtgccgttctatgagttttgaaaatccgtaagttcacatagctgccaccaccatcgagacacagaacggttccagcacctccccaaaattttgaccaccacttgtgctttaaactcagctcagtaacgcatatggtgtgagtccccagtaatgatagaaagcataggaacttcagtagctgcttgatgctgtgttcatttcacattaaaaacaaacaaacaaacaaaaaacctgtttcttctgggtcctgttagcaaaacttagtgttagtttctttcttctatttaaatatcttatgtcgaatttgtagtagaacgaaaatctttttgaaaactgttcagaaatctacaacctagagcatctgctattttgaatctttttttttttttttttttagcatccagtgaatgtacattttaggccaatttaaaattccgttttatgtttaaaactacaagacagccatattaaagggcttttagttattgtttttgttactttaaattaattacatgagaaaattagaatctgaacacttaatgcagctataacctaaagggaaaatagcaaatgctttgctattttttttttgtcttttttttctttttttgaagcatctttcccctttcttctttacttatatagattggactttgtctcaggtagacagaatttttgtattaaagttattcctagtgcaatttaggctgttattttttttttttcttgcttgctcttttttccctttcttcgactctttcctcttcctggtctctttcttcctttctcttttttttttctttagttgtagaaagttgagttccatcccaattattaaatcttaggagaccattcccacatggttccgtaaatggtagcttcatcccgcattctttcatctctttccctgctctctggcttgacagttgaaaaggtctgactgtgccacacaatggtttgattggtttctctgggggagacttttccctgcctcatcattcgccaggcaggtggaccagaaagtctcttgattcttttgttgcctctcaaagtccgaggtctttgactgaataaatctgccgtcatgggataatttgctaaaacgagactgaaagatgtgagagaaaagcctcactacttgggtgctgcattaatgaaataacggggccttggagtttgcaattgaaaaatcaccaggaatgcaatgggtggagacgggcttcttttatttcccataataaacttttagttctatcatttaaagcatgcctgtccctttgctcgcctgcaggcccgagtgtgtttgcatttgtacccatgtttaagggtttctggggacagccctgcccggctgaaagccgtttgggtgctgtgtctagttagtcattagattattactagtgggtggaaagaattccatatgacagaactaaggttgagttaacacaggacgaaaagtaatttacagataggctgtccccagccatctttgtagcccctgataaggtttcatttcagaatggataggcgacatttccacttacaggcccattctgcgacacctgtgataacagcttctggatcctaattgaaattggtttcaaaatggattttcacttttctctgtctgtggaaaatattgaatggactcagagctgccacagagaaccccagaccttggaaaatggagcagaaagctaggatcatctttcataacagtgtcgatgatatgacagttttgttatctgtcttattaatgaaatcattgatcacctgatgagggagataataaactacatttcaccaccagtcacgaaactcaattagactgctattacaaatagggagggggagaaaacaaccatggaataaatgtagaaaaggtcaattaaaacttttcattcccgaagtgaccatttcagaggagaacatgctgagtgactgcagtgcaagtattttgaaattgtagtggtcagcattatattcaaggactttcttcttggccaatgtagagtagctggcagttttattaagtaaaattttatttctcaaatattacttgtttcattatgtaaaattcagaagtagaaggggaagttctgctttgtttaagcgcatcataatggggaaaatgggagaaaaaaatccacagattctttccctccccacatggtgacgggatttggggccagccccaggtaggtatgttgggtaaggaagaacaaactgaaaggctcgtaacctaggttctttgaaagaaaagtagcttatcatcccttcctctcttaaagtgctttaggaatcctaggaagatgagacgggaattaggtttggatttaatgaggtggctctattgtttggtgttgggctgctctggaatgcgctctctgttccccttgaaggaagggaagagatgctgatgacctctcatgtttcacagtgaattgtattcctaggtgtttctccattctctgtgccagcaaggatcaatccatcccatctgagcttgaaagaggagctgtgatcaaaggcgctaatgatgtcactgatctctgctgattgattaggagcagaagttctggagaactcggcctttccttataatttcaaattcattagcgtctattaggattgctagctctcaatccgcaaaattagaaaaatgaatgatacagacaataattgtgtttttcttcatctatgactgttttttaagcttattggaaccatggttacattttataagcaacctttcccttttaaatatattgcaaagaaatggagtcttctttataaattgggttaaatattttggaatttgacatataaattgggaaaaatatgtgggtgtgaagatatttacattgtttccaaagcagtttaatcacatacagattacatgttagataatcctaaaatatatttaagtgttttattaacttggacattcaggagtttcttatgcagattttaaaatcctttgagttatttttgtggaactacctaatattttccccttgtcattcaagaggatgagtcatttctgtgtgcatatttatctttaaaaataaaaacaaatgcatttcatgccaagagatgacagtcttacaattgggaaagacgcaactggaaaggaaaaaataaaaagcaagagggagagagaaagagcgagatgtctctttctggaactgctcacgactgtaaccattggcttacatccacctagagtagggatcaattgcaaaagcattgggaaaaattctgttttggaaggcactgcagctcaagaaagaaaagttgaatggaaaatggagaatgtaaattattattaaggttaccattaccttattggtttgctgttggttttctaggactcttgcttcatgcttgcttatggctaattcctttcacagcaaattcattttgaggactgctctgagcagaactgataaatgtgtttgtggtcaagggtgggtataataaagagaagagatggtgcaaatgaacctttgggaggacatggcgtggcagttatgaatactaggcttagttaatgtcgaagactcccctttcacagaatattttttgttttagtggcaatgataagaaaaataatctgagacccttacctataaccaaaagagaacttccagaaagatttagaacaatggcatggttgaaataatggaacttacatcaatgtaaacattttctggtaaaatatgaagctaatatacaattgaagatttgttccaagcatttaaaaaccagaaaacatacgttggtccatttcacattaagcttaaattcaatctttcctaaaatactaatgtttctaggcttgttttcaaatcctggcaagtttgagagcagtagaaaagttcctttcttataaacgttgacagcagttcctgtgtaggctaacaatgttttataaatagagtttacttagcaaaaaccatatgtatgcccagtgaaataatctcacatttatttaccttttgatttatagaaaacatgtgccctctgacaaagcctttcggctcttttccgcaattaaaaagaatcatgcttgaaaaaaatagctaccgtcttaatgggaaactttttcacataaattcaaagcactttctttgatcagtttcgtacaaaattagaatatttttatccatctgtttggcccaaaaaactggatgactcagggaaaaataaaagatacttataaatctctcagttgtctgtctacatgtgtattcacacacacacatatcagcatacatactggctgaatattggggaatccaaggattaaacaggctggtgcagtgttacagcagaaaaatttctcttgttgcttgttcttgccagtgactagtgttggcttagcacaaggtagtttgttggtttttctagattgaagaggaaacatggtcctacacatacctattgctaggccttcatctggatacatgcaaagtatctctgccttgattctcttcaacaacaacagattgtaaggagagagagagataagataatttgcaaatctcttgtcactccccttttcttgaaaaaaaaagatatgatttttaaaaagcatgttttattttcgtttactactttttcaaaaagttcagagttgcgagttaggggtagaagagaaaaaccctttcttaataaagaagtgataatattagctgggaccaggctacaaaatactgctgagtcactattccagactagatccctggtattcacactgctctgggggcagggaggttggtggtggggagaaagtgagtctctatcaaatatagaaactttataatactggggtatactaataatacaagtacaagtcttacaggtaaacgccagcataactttgtaccttattttaacttgttgggggggggggctttcatttttgaatagaagtgagggattatatgtgcttaaaaacaagagtacaatttttatagaaattctctcttgtggtgataatgtcagttttcaagctctaggaaagcctagctcctacctccgtaaacaaataccattgaccacagtgacaacgacttgaagcccaatatgaaatctaagggaaatgaaccatgttcgacagcggggcgtcttcaccagcaatcccaaaacccttgaccttgatggagaggcatctgagaatgggtgaacccctttggaattattttacatggcactttatggacatgggcctatgcccttttttttttttttttttttttttttttcagattcttaaagagatgtatgacccagcatttgccagaggctctcctttacagggagtatttggagctctaactttcacttggaaaatttaggtcaaatgattagaattctctttggaggaatgatgatctgtaagagcaagactgtctcaaaaaaaaaaaaaaagagagagaacctctcagtgattaggaaacgtggagctgagtctttctcatatacaacatgatgtgatcacatagttgtagcctagctaattttgtagttggttgcacattaagaattcaaaagattctgcctgcacatcactttatctgtgaaaacgaaggacttgggtcacatgatttaaagagctctctctcccttgatattcttgatattcaagtctccatgacaggggctccaatttccacaggaattttgcagaatgttaaatgaaaggaaagatgtcccataaataaggggagctggagaagaatgagttaatataatttaagtttagaacaggaaattcagaattccttttaaattaagctgtgtacatcacatgtatgggtccatcttgggttaaaagccactgaagattttgtttaggccaaaatgtactatcacattgttgagtcaaatactattccagagaccaggcatggtggcccatacttgtaatcccagcactttgggaggccaaggaaggaggattgcttgaggccaggagtttgaggccagcctgggcaatatagcaagaccctgtctctacaaaaaaattattaaaaaattagctgggcatggtggctgtagtaccagctacttgggaggctgaggtgggaagatcacttgaaccaggagatcaaggctgcagtgagctatgatcatgccattgcactccagcgtgggcagcagagtgagaccctgtctctaaaataaaaattaaaaaaaaaattgcaagtattttgaagggtactctacagataaaagtttcaggtacaaattcagggagattttgcccaattctggctgaattgctgataattacaattagctgccacaacagcagttgatcctttgaaatctgaaatgtgtgttttcttgatttagacttggtattattcattacccaccaggcttcctatactcatcttcctggaagaagatgtgtgtggcagccagaaggaacattttggactcttgtgtgactaactcctcccagatcatggccctctttcaaacctcttgaacatcctcatagagtgctttgcatagttttctgtttggcatctggttttatgtagttatagttcatcatggcttcacttagagcttttgcaaatttctttgatgctaatttagttgcattaaactttctggagtggaaaaaagaaacaaaaccaagagtacaataaactttgattaccagacccctaaacactgaacctctcaagtaacccatatttgtaatttattctttcagattagcatttacaggcgggagctggggaacgttgttattgaaaagttaggcagcagcgttcagatgcagctgaagcaagggcactaaactttcacagggacacttggagaaggtgctgcatcatctaacgaagattagatggtttattatatagaaattattaaaataattcattttagaaagagttccagtaaaaatggagcctaaaggagccccaggaatgcaggacgcctctgacttcactgaaggccacatagcctgctcactccagcctgagaccttagacccatccatgctattccctgctctcctctgtcttaaatgtgtttttatttttatttttatttatctacttattttttgagatggagtctccctctgtcgcctaggctggagtgcagtggtgcgatctcggctcactgcaacctctgcctcccaggttcaagtgattctcctgcctcagcctcctgagtatctgagactagaggcacgtgccaccacgcctcgctaatttttgtattttttagtagagacggggttttgccacgttggccaggctggtgtcaaactcctgactttgggtgttctacccaccttggcctctcaaagtgctgtgattataggcgtgagccaccgtgctcggctgtgcttttatttttatgaaaggaatacttgctcattgggaaattcagaaaagcataaaagaaaaacacgaagctggcctggaatctcaccacttggaaaataaaagttaacactttggtatattttcagtctttctctctgttcaggtaaccatatgctaggatcattttctgtgtcatgaaccactcttctccaacttggctttaatagctatgaatttactcaatcaatcccctatcattggacatgcacattttttttcaattgtgaataatgatgtgatgaaattccttccaaaaaaactgtgtgctttgactacatcttacccaattagctccaagaaacacagcaacttatatttccatcagctgtttatgtgagtgctcattttcagaaacacgtatcaacattagtgaaatattttaaaagaagataggataggtgaaaaccttacctcgctttttaaactttttaattgaaatacaatacacagattaaaaagtcacatagcataagtgagcagcttgatgaattttctcaaaatgaacacaccatgtaaacagagcccaggtcaagaaagaaacgctctgttgatccacgctactgctgatgggcatttgggtggcatccagggtttggctgtcaggaacattggctgccaggtagctgtcttttggtggatctgaatacacatttctattgggcataaacctaggagtggaattattgtctcctagggtatgcatatattagctttagtagacactgcctaatactcttcccaaggggttgtatagacttgcttctcattcgtgtcaacacttggtattttctgtatttttcattgtagcccttctttgggctatgcagtggtatccagttgtggtttcatttgtctctgatgactgagggactcaagtatctttttaagatatttatcggccgtttggatatcttcttttctgaagtgtctgttgaagtctcttttttaaaaaattttttagttctttgtgggtagataattgtttaccagtttttctatcactgatttgaagtgatacctgcattggttactgccttaatatatattttaggttctttttctgtaaaattttattgtatgatcaacctgtctattcttttgttgtaccatactctttcagatgttatacacagagtacattttatctgataatgcacattatctcttattattcttccttttcaaatggctcttggcttctattcgattttttcttctagctgaacttgaggaacacctttgtagaactatgttacttattgaattcatatgtatgaagtgaaagtataaaaacatgcatggatataatcatttctttaatagtggttaactctggggagagtggaaagggaacaagatggagagggttcagctctatctgtattatcttatttcgttaaagagaagaggttttaagcaaatgtaacaaaatattaacatgtattaaacctgtgtggcggatacctagatgttgcttatgttattctctgaaatacgtcatgattaaaagtatccctttagaatttattattattattattgttattattattattattattttttagatggggtctcgttctgttgcccaggctggggtgcagtagtgctatcttggctcactgcaacctccacctcccagattcaagcaattctcctgtctcagcttactgagtagttgagactacaggcatgcaccaccacgcctggctaatttttgtatttttagtagagatggggtttcaccatattggtcaggctggtctcgaacttctgacctcagatgatccaccagcctcagcctcccaaagtgctgggattacaggcatgagccactgcacctaaccccttcagaatttagtctggtgttatattaagctaacttattgggctttattgtaattatattggctgtgggaagcaatcttagtcgtttttctgtggcattctcacaaggttactctcttcccaggcgtatatcaaagccacacaaatgcacacttgctttggtgtttacattttgcatttatctttagaagtgttttaaaaaaatctgtcacttataagaaaatacgtaggaaataacagttggcaagacctaacaggtgtttgctgtgttttcaccttttatactttaacatgttctggaagcaatttagttttacttttgtctcatctgtcttgaactgaaagttgcaggtacgttgatgagtactctggttaatgtaaacacctcttatattggctcaggaaaagtacgattctccagcttctctacagtgggctgcatgcttattaagtcacaccagctgccctctctgttctttgagagtggcatctgttgtttggtgactttttcttctgaaatctgtcagtgccaaggacaaggattaggagtgggttgaggctgtttgttatttgtttgttgttgctgggagttacttaatagtggtggaaaaggccaaaggaatattggagctcttacccttgaccttaagttaccctaactttagggtaaccttagtcaactaatgacttacaggtgccagacttaagataatgctggttgtcaaatcaaagagagaaggtatgtgtaggatgtggtctcagttccgtacatggtatgttgctaggatgcgtatgtatgaggtggattcttataaaaagtatcacaaacacctttaagaacaccacatagcaggctatacatcccttcaaagataagaagtgtcaccgtctgaggtgtaattccagcagtttcttaagcctcaacttcgtacacttgaaagcacacccacaacctgctgctgaaagcttttggaagtcattgagagacatggctcttgtttattctccaaattttaaatcatgcagcgtttggttggccttttgtctgaggagatacaaatttatcatagccatgtcaataagtacagaaaatttgccagcccacagagaaatttgaacttccttcctttcccgaaggagagtctcggggaagtcgtgcatacaatagaacttttcatgtctagacctggtccaggagaattctgtctaataagaacttttcttttttccttagcatactcaaatggaatcaagctcagaaagaggttggggacagaatttagggaaataaaatatagaaaaccctggaccatctattttctgaactcctttgcagttataagtgtaaggattatttttactgatgtgcttccatagtcaacaaacacttattgaggctgtgctaagtgccaggcactttatttgattgtgaggataacaaaatgtggggcctgctgttaagatatttataattggataagtaaactagcaaaattcagtacacttattaagtgcaatgtaaacaacatctatagagtatgaaggaaagtctcacagaagaggtgaggagttaaatccttcacatgtcaatagtgatggcagggggaagacaggagtgggaactgggggctggagaaaggcattgtaagttgagagagcagtagaagcaaatacttaaagcatgagcattctcggtggtttggggaaatggtaccaatcagggtaggttgcttgttggataggcatggtttggggagaggaggatggaggcagagaatgtgaatggagaggtatatgagtcctattggtggaggcccatgaaggcgatgctagacactttgggctccatccttcatgtgagtgggaagagcagagtggtgggataccatctgctttaaaaactacccttcggccctagtgggaaaaatggtttggagtggggagaatgaatgtgatcaggaggcctgggaagagagtaatatatatatattttgagatggagtctcaccccaggctggagtgcggtggcacgatctcggctcattgcaacctccacttcttgggttcaagcgattctcctgcctcagcatcccaagtagctgggattacaggcttgtaccactacatccagctaacttttgtatctttagtagagacagggtttcaccatgttggccaggctggtctcaaactcctggtctcaaatgatctgcctgtctcggcctcccaaactgctgggattacaggcatgagccaccatgtcaagcctcaaatcaatattttaaagagatatctgcagtgccatgttcattgcagccttattcacaatgggcaagatacagaatcaacccatgtccatgggcaaatggagaaagaaaatgtgttatatacatagtggcatactatgcagccattaaaaagaaggcaatcctgtcatttttgacaacatggatgcaactggaggacattatgtcaagtgaaataagccaggcacagaaagaaaaatgtcatgtgttctcatcatatgtgggaggtaaaattgaagtagagagtagaatggtagtaggtaaccagaggatggggcacttgggggacaggactggggagatgttggtcaaaggatacaaaattacagttaggtaggaggaataagttcaacagagctattgtacggcatggtaactatagttaatgaccctacattgtattcttgaaaaatgctgagagtggatgttaaatgttttcaccacaaggatgataattatgtgaggtaatgcacattctaattaagcagagttaattgttccacaatgtgtgtgtatgtatacttcaaacatcatgtttaaataaatacacacaattttttctgtcaatttaaaataaataagtaaacaaacaaataaataaaacaatttgtaggagggaggaaatcagagccccctcgcacttgttcttcaagactggggtgggaatgttcatgcctcccatggtcagctcctcctttccctagtttttagcatgagattgtgaaggctgatatgaatagaagaattgggtttaggaatggtgaatattttgaactgtctttgtgaggaatgggaaaagatgctgagtgcataagagtgggacttacagtcatgttgggggccccctgaggttggtgtggtggttttatgatgacgtcagtgggacccccgtccattcactgcagcttctaacagagcggagaaaacaggaggctgtcctaagttaaggatggcagcctgggggcctggaggacactggcaaaagacgatgcattcacctggctgctctcagcccatcagcctggtgatgtgcatgcttgtgagggcacttagccatttatttgtgcaagatggcatttacgaacatagcttttgtggacatgaaacccataaccttgccttcgttcttagtgatgctacctgatcattgacataaaatgaatacaatcgatactgactactgctctgatattaatcactagttttagtggaattgctgtcttacatgtttttagaaccaggaagcatgtttagtgagtctgtgtagtatactgatttgccctgtgtgtgtgtgagtgtgtgtgtgtgtgtgtgtgtgtgtgtgtgagagagagagagagagagagagagagagagacagattctatgaatttcaggtgaggtcagatttttggagagaacacagaccaaagaggggccaatgcctctatctttggaatcccattataattttcatttaccatcagttttaagtattaaatgtttttaaaaaaatgcattcatgagccacatgaagatgatggatcaacaatggactgcatatatgacagttgtcccataagattataataccgtatttttttttttttttttttttgagacggagtcttgctctgtctccaggctggagtgcagtggcgtgatcttggctcactgcgacctctgcctcctgggttcaagcgattctcctgcctcagcctcctgagtagctgggactacaggcgcacgccaccatgcccagctaatttttgtatttttagtagagacagggtttcactatgttggccaagatggtcttgatctcctgaccttgtgatctgcccgcctcggcttcccaaagtgctaggattacaggtgtgagccatggcgcccggccaatacggtacttttactgtacttttcctatgtttaactatgtttagatacacaaataccattgtgttacagttgcctacagtactcagtatagtaacatgctatgcaggtttgtatcctgggagcaacaggctatgccatacagcctaggtatgtagtaggctctactatctgggtccatgtaaatgcactccataatgttctcacaacaaaattgcctaacgacacatttcccagaatgtgttcccatccttgcatgacagtacagccccaaagtgacttctggtttctttgcgctagtgtgtctgtctatgtgtatgtgagggctattctatatcatgatttgtggccacctactagctttgggtcttggaataaagtacttaacctgtcccttagctgtggcagtaacagtttctacccgatggactgattctgtcaattgcccagcagttttggacatttattacaggagtccctccttacccaaggtttctatttctgaggttttagttacccatggtcaatcatggtccaaaaataagtaagtgcagtacaagaaaatattttcagaaagagacagagagagagagagatatatcacattcatataacttattacagtatattgttgtaattattctattttattattagttattgttgttaatctcttactgtgcctaatcgatagactaaacggtatcataagtatatatttataagaaaaaacttagtgtatacaggattcaggactatctgtggtttcaggcatccactgaaatgtatctgtggaggataaggggggactactgtactgaattttaatattacttaaaactaaattgcacataattttattgtttaagtcctagagtgtgtccactaggcagcattctgttctcctagaaatggttttcatgcatttcagtctgtcctgtgtttttgcacaggctcaggtttaaccaatccacatataaatgcctatttttttttttctgaaaagttttgactaaaggagagtcttctgtctcatgatttgcccacagtgcccaagaagtcgtgagggagctaggataagacttgaagcctgaccttccttctcataacaggaattgccagaccagcctgtccaaaatgagaagcatttgttcagacacaagaaaactgtttttgctggctttatttttaaaatgatataatttatcactctttcttgtgtggggcaaaaatctgcctccccatcacttcaacactgcctgacccctccttgcctggtgtccttcaaaggcactttaaaatagtggatacgggaggtagtggagcgttctctggctttctgcatctacatgagttagtgctaattcttcttccgcaagtacttacaaatatttgaaggataaggcctcaaagtctctttccttcattccttttacctttttcctgtctgagttggctttgaatgttcactgtctgttcacctgggcctggacatatggtccctttggaaaggataaagtgggctgcttggcatggtggatacaccatagagcaaactattcctgttaatgggatagattgaattaggaaaccaggtttcacagctgtttgactctccgtgacctccatgacggaaggcgatatcctaggtattctttcctacctgctgccaagtcttatttctgccattctttgctgaaaatgacttgagtagtaattgtttggccttaggtataggtccttttttgagacagagttttgctgttgttgtccaggctggaatgcagtggcatgatctcagttcactgcaacctccgcctcccggattcaagcaattcttctgcctcagcctccctagtagctgggactgcaggtgcccaccaccatgcctggctaatttttgtatttttagtagagacggggtttcaccatgtaggccaggctggtctcgaactcctgaccttatgtgatccgcctgcctcgacctcgcaaagtgctgggattacaggtgtgagccaccacacctggccaggtataggtctttatatttatctttattaaatatcttctccttggcctcagcccatcatcacaggataaatccgataggacatggctcctgccctcaaagagctcaccatgttgtccagctattaggctaaggtgaaaggagaggacacacgtgtgctcacacacatacacgcacatatatacagtcttttgttcaccttctacttttgcatgacaaccattgcatataaaaactcactgtaaaaacgaaagcagttgaggtagagctgtctgccccagctgggactgtaacctgcttggtgagacaggggaactggaaggggagtcctgcttgtgtgcccgtactctggttttctgcctgtgtgtattgaggtaaatcagagttctaacgggcttttaatgtgctttctgtaaacttattagaaatagatatcttgcctgatgcctgttatttaccttgcatactaatgtctgtggatcaacaatggaaaattttcatctgctccaaagcaggctagaggcctgaaaatcattttcagaaattttagaaatgttagtaacccagctttgcggtgagtagctaaaaccacatctaacatttggatccagctttgtgcgttttcaaagccctgctgcttcttgcatgtctaactggcatttttataactctgttcctagtattctcagtgtattcttcttttgtttctcgttgttaactgactgctttatagatgccatttgttatctatcatcataataaattttggggaaaaaatgccttgtcattttagttggcagtgaaattgtcccaagtcttttctttttagttaaaaaaaaaaaaaagaaactttttcttagagtttgagtattttaagttatgtgtttttgacaccattaattatgtctcatctggttgtttttaaagtgccaccatctaacattttttttctgcaagagagttaatctgtgtgtgccgcctgtgtgtttgtgtgtgtgtgtgtatgtgtgtgtgtgcatatgcatctcaaggaggtatcaaagttgcgccctagagggaagtactgatttttaaaaattttagatactacattaatcccttaagggaagttctacagtcttgatacctttaggaaggtcacagccatttgcctagaaggccctgattccaggtcttgccaaaccaccttcagatgaggtagagggtgtttggaaaataaacagaacttgtcctggcctgtgagtacagtcatgcagtcctcccacatccccggagctcagcatccccaggattggctctgcaacggagatctcaggacggctcctcaggcaagcagtggagttgggaaagctcacctcatggtgagtgttttctcgcttgtgctcctggatccttctcactctccagcctcagacacttgactgcctctctgaagctccgaacctgccctggcccagggcttcccgtcacatttcccttcatttttcctttaaggaaccaatcactcaatgcagttattccattttttgcacatttgcgtgtttactttctgtctctgtgcagaatgtaagaaccatgagcctgtcctgtgtccttcacatagtgtctcagtgcttggaacaggggccgccacagtgcaggggctcaataaatatttgtggaatgaatgagtaggtataaaaatgaccttaagccacacctggaagaatttaggataatttttactcccttcagggaataaaatgctccagtctagctttgggttaagatgcgtttgcagagtagatgcttgggccatttatttggggcggccacacctatatgtacccgaatcatgattctctgctccctgcctccagtctgattcaccatctttgactggttccctttaaacacatcaacgtgggcttcctgaaggttatgtagagcgagagccttgcgttaacgtggactgaattttcagggatttgcacagctgctgtgacgcccagaccattgtttcagtctcaatgcatgagcaggcgctgactctcctgtctggggtagctaagcccgacactgcttttaggcctgtgagtagcgaactgtacctcccgctgaccggaacatagcaaagtggtgaatttcaggtgacaaaggcccccatccttctctgtactgagtaagggctccgtgctccagtagcacgacatttcatttggttttcaagttacgtaatgaagaggaattcagagtgtgcttgaacatatggccccaaggccatccagtggtcaactccccctgctctctaagagcaagttgttttaactgtgattgtgttagtcagaggattaaaataagaagaggatgcccaagttaatatccttgcatttctctagaaagggaccatagtgtcagaactctgtaacttctgccggggcatcttggtatccacaaggtgaggcctattggttggtattggtgtattaaataaagcctaaaaatggagtgatttttatgtcattactcttagctgcatagatcttggatagctgttgataggttgtgaagacttgatttttctagggaccctgggaaaagccgattaaacttgatgacgttaagagggacacatatagtagagaaaagcagtcagtaacgggggtcctgcagacagccagactcggatgtgagttcaggtcctgccctaagtatcaggggccaggaaggcctaagtcagggctacattgtaggcctcagtttccttatttgtaaaatccagaggataaaacttcttgaagggttgccatcaggagtaatagaaatgaagcacatgatgtatacacgacattgtcgattccctgtccatgtcctttctgttgagaaatactacttgatggcttctttaccattttgttccataagtaaacatgctgccaaccaatattcagatacatttccttttcttcttttatcctttctgctttccttcccttctttttctttccctcttgattagaaaggtccagcattttttaacatctcaagtgagacatgaaacggctttgaagatgatctcttgtcaagtgtaccaacagagattttagaggaaatttggaatcttcatgtcagaagcagtgttgtcttcaccaggttcataaggtggaactaagataaacttatagtgtgaactttaagtaacaaaggtggtgacctctttaaaaatctatataaatttaatctttaatgctttaaaaggggatgctgaaggatgcttttgtgtaatatattttttggtgttctatttacacgtagatttttaaaagatcttttttgggaggtacatcttctgcaatgcaacgttaatcaggacgcctttgtaggtagagaaaatatttagtctcctgtaaagctggcccctcccatccacattttctgcagctcttatttaacactggtgagaattaatagttgaaattcaaagagctgactgacattctctagcctagataatccaactatgtttccttaccactttctgctaaaagagatttacgatgtacctgcattgagaggtaggtccctttaaaagatatttcccattttgtaggaccatgaaaatgtctttaatcatgagtaaatgaagagagccagcattgtcttctgaagaatcttggggatccaccttatttatttatgtactgttggatattagtgaggataggggaggctgtttttgcttttctccccattaatttttgtgtttaacgttgtttaccttattggacacactccacctgcacaacttggcaacaaagtcatgtatgaaaaatgatcaaaaaaggaattacatttaattgtagcattctagttagagccaagatacatagaaactgacacactgtgtctgctcatttggcccttctatcctgccagaggaagatagcaaaccagatttattgaatacttactcatctgtccatccacccattaattcatgcattcagtaggtatttttcatgtatgtcctatgtgccaatactgtgctaagtactgagggagtgaattaaacaaataatttctgcccttagggaatagatggtctggtggtgaagcttgattattaaataagctatactaataaattgtgatgattgccgcaatagagcaacactgcagggatatgagaggacctagtgggggcactggcaccattgggaacagagctgggcatctggggacatttcctggaagaagaggtatgcaagctgaaacttatgaaagaatcagaaaaagcactgtaaaaacagatgtgaggaggcaggtacaaagggaggttatgttccagacaaacggggttgttgggcagactttccagaggtaaaagggaaccttgtatatcaagcaattgaaatcaccttactgggactggggaatggaagtgggaggtggtatgttttgacgaagctggctaaatagagtctagcttatgaatgcctaagaagccctgtttcattttatccttaaggcagacatgacagtgttcaaggatgggagataggtttgtattggtgttatatgactcaagctacagtgtatgtaataggttagtggggcaacacagaagacaggagaccattaggaggctacttcattaactcaagtgcagactggtgatggcttagacttcattggtggcagtgggggtgagataagttgacgcattagaggccaggcacagtggctcatgcctgtaatcccagcgctttgggaggccgaggtgggcagatcacttgaggtcaggagtttgagaacaccctgaccaacatggtgaaaccctgtctctactaaaaataaaaaaattagccagacctggtggtgggtgcctgtaatcccagttactcgggaggctgaggcaggagaatcgcttgaacctgggagacagaggttgcagtgagccgagatcatgccactgcactccagcctgggtgacaggtgacagagtgaaactccgactccaaaaaaaaaaaaaaaaagagacagagagagaagttgatgcattagagacatgttagtttaaaattgacagggcttagtaggactctggggatggaggaaggagagtcaaagatgctacctggttctctagctagggcttcatgggtagatggaatgccgttcgctaagacagacgggagtagagcagatttagagacaatgatgaccccaaatttgtcaggttaagctggagggcatccaagtggctggatataaagctcagaaacttagaaaagagacttgagttggaactgttgatgttaattgggaaaggatgaagtccaagaagcagagccagaaaagttggatgtaggcctgaaccccttgggacaacaatgccgaaagcagatagagcaaaaagtgctgcctcctgggagcttggctaactgagaatatggtgactcttcctagactatacacattaaagtttggccctgtcctttcttaatgtaaatattgatgagtctgtttcattaattaattatcctctaagcttattgtcctcattttgatgtggtctgtgtacctatgatgaggttgatcaatactgggacaaatagagttggtgtgagctgaaaggtttttctgcaagcagtttgctgtatgaaatggatatgggctgggaataggggcaaggaactgtccttcaggcatttttacaatacaaaaatcgatactatcatcatgggcaaaaaagtaaaagcgaaagtccacaggaaatgtacatactgacttacattatttgctatttttgtccttctggagagggagggagtacgttttcaggggacggaggaggggagctttagcggtatctgttttattttctttaaagttatctgaggcaaatatgggaacatgctaacattccttaaatctgagttgtaggtaacgtggataactagcatgtcctttttagtacttttctgtatgttggaatatttcgtaatcaagagttattttttaaagaaataaaaataagatgggatggggtctgtgctgactgcctgtttgatttatatccaggaaaccatgagaaaaccacaggtaatactgagttaaaaaggagctgcattcagaaaccaggccttgggtggatgtgggtgttcagatagttcttcatcaaagtcataaaacacaaaaacctctgctccttgctgggcatgggagaaaacgtcccacctgagaacaaattaattttatgtggagacttttaattttctctcaccttttgctaccaatagaattcctgagtaatttgagtcaggatttttttttttcttggaactctagatcaaaggtgtgtccttccgagctcaggcagagtgtgttcctggaggccaggctttcacaggcaggaggaaagggagagcagctctctgggtggaggagatagaagcttcctcgagggatttttttaaaccccttttgaatgggctcattgtttataagaacagctccttaatggaaaaacaaaaaggcaagagggtctgtaatgtgctctcggctttcctttgctcagcttcattgtttatttgatttatcaagtctcaagtagttgtgcctctctgtgaccttccttgagctgtttctctagagtatccatttactttatttagaaacataatatttaaaaactctggagctgagtcaaaaaatcgtcacctttttgatgtggtcgtttccccccttttttgaaaccctaaacttgctggggccatcaaagccctggattgcagtctcttaatcatcaagtctttctgggtgctgggcccctggggcctgtggtctgtgcaaggctggagacaggctggcctcaggtcctgctggttctcgttgcctgtttgcacgtaattagaggacaagatgctagataatttggtgctaagtggtagagaagggactgccaaaggcacgaattcaaggtggtgctctaagggggtggccctgaagtggaccccaaggtatgcttaagcagagattaggaggccttcccctcctgttttaacacagctgcagaatgattcctgaaccttgattttccagattaaacattttcaacagaagaaagaatgttgtaaaattagagtttgtttttcacatttatcatcctctttccagcgcccccatctctctttggttcttttttgttttgttagactttttatgataaggacttgttaaagaaagtttgaaggccaaagagtagatgtcaaatataatttcatcactttaatacatgagctgttttaaattttagcatctttttttttgtctttatctataccttgtctcaggttttgttggttcttacgtattttatttttcttaaaactaaggagccaccaaaggtgtaggcagaactctgttaggaagctgatggtcaggaagagatgctgcatggacccaagtgtggagattccagtgactagcatcttagaggacatttttgtatctatgattgcaatttcttggctggctactcacatttttactagatgaactttagagtcacctcattaaactccgcctcactccaagcaaaacacagcatcaacaaaaataaatgctatctctatagattgcgattggaattgtgttaaatctattatttttcaaggggattgacatttttataaggtacaattttcctattgtgaaatatgacatgtctctgttcaaataggattttttttttctgtgattgtagaagtttaaattttttcatgtttttgcatgggtcgcatgtctttcttggctattgtttggtttattcttggcagtttagcttgtatgaccttttggcttaattgggagcagtatggtaaaatggattctcatgaggactctgcattcacactgccagaacctactactggttctgttgtggctaccagtgagacttcgggcaggatatttaattcttccaagtcttggttttctcacctttaaaaggtggacagtaatggtatctacttcatagggttattgtgaaaagtaagtgagttaatatgttaagggcttaacactgtttctggcagttagtatgtgttcaaaaaatattatatatatatatatatattttttgaaacggagtttcgctcttgttgcccaggctggagtgcagtggtgtgatctcggcaccgcaacgtctgcctcccgagttcaagcgattctcctgcctcagcgtcccgagtagctgggattacaggcatgcaccaacatgcccagctaattttgtatttttagtagagatggggcttctccatgttggtcaggctggccttgaactcccaacctcaggttatctgcccgcctcccaaaggatgaatcaatgaattcaatggatcaatggattcattgaatgaatccttgcctgggattataggcgagagccaccacggccggctattattatctatttttattgactggtaattgctggtgaacagaaaagctatggatttctgcatgtttattttcaactttatggctatactaaatgttttatttgtcttatcgtttttctgttacatcttctgtgctttccagattagtctataatactatctgccaataataatatttttattttcctttcagttgctgtatagtgtatttctgttttatgtaacattgaactggcttcaacttcctggataatagtgattaataatgaccataactatcttggctgttactttaatattattttttttatcaggttaaggaaatgtctttctagtttgggtttcattcttttttttaaaaaaagtattaaattttatcaattactttttatcatctcttgcttttatgatatataatttttctcctttgacctattgatgatctttgtatgttttttcataatatttctaatcatgttttctggtataaggtctatttgattctagactttggtataacttgatatgctagtattgtatttagtatcttagtatttttgctgtgtgtccatacatagttttgacttttagtttttcttttttgtcctcacaatactagatttggtattgagattgcatttgttttcaaaatgtattgcaattttttccatatgtcttaatctagaaaagttttcacaacatgaaaccatctgccccttgagtgtttgaataaactcacacacaacgctaccagggtctgagtctggagcctttattggaaataattttgaagagctatttcagtttcttccattgttattgagtctttcatatgttcttaagtcaattctggtcacttatatttaatcaggattttaaaatttaattgcatagaattttgaaatacacttttttaaaaagcaaacaactctttcctgtctatgtttacaccccattttcagtttgtgcttgtattgtctgtctttctaatcttgggtggatttgcccgtggtgttttagtttgttgtgttccccatcctctaaacagcctgcttcgggatatatttataaattctaatggttttcattttttccagatcataacttatttttgccattgttgttattttcacttcttacctttttcaacttgtaaaaatgattccatatactgtttttttttttttgacagtaagatgatattcatgccgctgactttgttactgcataaaatgactgttggtaatattatttgcaaatgttaatacctttaaacattttccctatgtaattgcaaaatatagttctctgtgtgtgtgtgtgtgtgtgtgtgtgtgtgtgtgtgtgtgtgtgtgttgagcccatgcacacatatatgtgttgcttgggcatgaatgttcattataggatatatccgaatctatcttggtataatattagatgatgatagattttgaaaatacttcaagagtaattgattcagacttgcttcttataatccaagaaaggaaatgattcatcctgttgttaataatcagcagagaggaagagagactcctgctatccttgctaatttactccagcactctgtcaagttttggtaagaacattctcacttctgtgtcatcaggtcttacttgctgtgttttgagcctgtttcctcccctttattcttcaaagccatcagagtacaaagtgggtgttcttagtaatcttttacatgcttgaagatacatgttagagtatctgaaccttccatattttatttcttccactgatagttttattttgattttggctgattacagcttttcctgattagcttttaaaaatggagaacaaaagactccttgcttttataagggtatgattagtactcaatacaggaaggagttctgaaatgctaactattgatgaagtcattcaccttagtggtttaatatctgtttctatcttgtttttaaatagggtgactttctacaaccatctccctgttgtgtgaatgtgtttaggatttttgtacgttgcatgttctctcttgattgatgattgttctaagtttgttcttttctaaacatcccattgattggctggattatagtttattttattagtcctttattgttgcttatttaaggcattctttttaaaaaatagactattttttagagtggtactgggtccatagcaaaattgtgtggaagatacagacatttcttatatgccttcctgcccccacacagccacaacctcccccactgtcaacatcctccaccagagaggtacattggttacaactggtgaaccaacatggacatcgcattatcacccaaagtccatagattactttaggggacactcttggtgttgtccattcattctgtgggtttggacaaatggatagtgatgtgtatctgccattatagtattatacagagtagttttattgccttcaaaatcccctgtgctctaccagttcttccctttcttcactcatccattcctaccacccctagcaaacagtgatctccacagttttgcgttttccagagtgccatatatttggaatcatatagtacatagactttttatactgccttctttcacttagtgatataagtttcctccatgtcttttcatgacttgatagctcatttcatttcagcactgagtaatattccagtgtctggatgtatttatttattaccgactgaaggacatcttggttgtttccaagttttggcaattatgaataaagctgctataatctctgtggtgtgttcatgttttacttttctttttactgatataaaagcaggtggtggttatccttgtagctgattttttgttcctatctctgattatttttataaattccttaaagtagaattgctggatcaagaaatagttacatgttaagggtttaatacatattcagaagagctaactcaacttaccctttaccagcggtgtgtgtatttatattattagtcgtcttcaatacaatagatgccaggatagagacctttccacctagttagtttacctaggctgctataacaaattaccacaaactgggtggttttactctctccagttctggaagccagaattctgcaaccaaggtgtttgcaggcccatactccctctgacggctctagaaaagcattcttccttgcctcttccatctcctgggagccactggccatccttgctattgcttggcttgtagatgcatcactccagtctttgcctttatctttacatgatgttctcccctctatgtgtattttagtgtctgctggcctattttttttttttttttgagatggagtctcactctgtcgcccaggctggagtgcagtggcgcgatctcggctcattgcaacctctgcctcccgggttcgagcgattctcctgcctcagcttcctgagtagatgggattacaggtgcctgtcaccacgcccagctaatttttgtgtttttagtagagacggggtttcaccatgttagtcaggatggtctggatctcctgaccttgtgatccaccggtctcggcctcccaaagtgctgggattacaggtgtgagccactgtgcccggctctgctggccttctcgtaaggacaccactaattggatttagggttcaccttaatccagtataacctcatcttacaaattacatctgcaaagatgctgtttccatataaggtcgcattctgaggtccttggtggatatgaattttggggaggacactattcaatctagcatgattgcctgatttttattttcttttgttactcagctttaaaaaataatgaaaatcttattagaaaattaataataccaagcagcagccacaggaatgatgataaatgaactttcaccctttcctcttatgttgccatcatcttcagtgataaacttgataaacttattcttgatttcttcttccttgttaatacaaatattaaacaataatatcctagatatcaaacttcactgtaacattttcaaaagaaaatgtatttggggtttacttagatatggggtgaatagcgttttaaaataattttattgctaatactcttcttcatgttttttttttttttttgagacagggtctcactctgtcactcagacttgagtgtagtggcatgatcggggcttactgtagcctcaacctcccaggctcaagtgatccttccacctcaacctcccaagtagctgggaccacaggcctgtgccaacgcacccagctaattaacttttttttttttttgagacaggttctcactatatagctcagtttggtttcaatctcctgagctcaagcaatcctcctgcctcagtcttccaatgtgctgggattataggcatagccacagcacccagccatcatgatcatttttaatgctattttgtcaggtttattctagatggctccaaaacatttaaaagctcactttagccattattttatttaatcccaaaatgtagatatcatgaaaatgagatgtggtggtttataaaagttgatctggtgtagaaccagaagtctgtttgaactaactgaaaattcaggcatttagatctaggatatattattttcaaagatgatgtttgtctaggtttatttaggcaactggatttgttgtaaatgttgtgggccttccagtgactaaggcctgaaagaccctgaattttgcgttccatagtgcagttgcactgatggtcaggggtgttgtccccaggcagggcagttgtcattccgctgctgttgcctctgggtgctcatgtgatttttcaggtgtctcatctgtgccttcttgtgagcacatgatcttgttttgagactctcaaaaggcctttcaaatactttttttcttgcaaaatcaagaacgtcattattctttctgtgagtctctcatgggtacctgctatacgccaggcacggtgctggccactaggggtgctaaccaaggcggagagggtggattttaaggaattccaactagggtgaaacgcagtacctaaacattcagttataataccatgccaagaatattatggttgagagactttgaaagtgctctggggagctggaaggaggaatatgaaattatttgattggaggagggttgtcagggaaagttgttgagaggagctgagattttactgtttttcgttttagacaccagcttctgcagcataagcccatggtaagttcgctatttggttctcatatgctgagccacgttttaaggctgtgttttatacctgggattgctgacgatatggtctggcttatgtgatcatttgcataatgcatggtgacagtgaggctaagttcttagctgctggtccaaataggcccagtgtgtgccaagagttgctgaaatggctgccctggcccaaagagggagcctagcacatgccccatgactccagggacaggctgaggctctaagctctgagaggctggtgtttgtataaatggtcaacccaggaaagtgagtacacactactgctgccagggtgtgtgtgcgtgtgtttcttagatcacaatctttcatccttgatactaatagcaccagttgcaggctggagagactcactggttgttcaagaagacaatgcacatatactctgtagcagcacatctgtggtgcataggagtgcacaagggaagctgtagcacatctgggcagctccaaaatgtcacgaataaagcatctggatatttgtacttcctgagagctgcaagacagaagctagagctcatctgtagtatctgagaattgcccaagaaatggctctgagcatcctgccataattataggaaaaatgtggcttgaagagcgtgtggatcatactactacttgaaagcatctcagcatgttttgtgaatcccctctgaatggatgcaggaaaaagatgcgggagagcatgagtgggtgatagggaataagaaagcagcctggagaaggaagcggtcttttaggtggtccctggacctcttcccatgagttgggagaaaacacatggctaaattacagtggatttgaatatgtgtggattctgatggactcaggaaacatgccctgaaacccccacagtagggtgaattaagagccctgggtgccagctttgtaaaagcagtcagtccaggtagaggaggggacccagtagcacaggacaggaagacaccaaactgtgtagatctcctcagcctgcctgcctgcatgcccaggtgggatgggagccagtgttcaccttaacaggcatcatgtgtgttgcaggttgcatttcccaggaggcagactctgagatagagttttgtgtgcaggatgtttattagggaatgccctcaagacaggcatctggggaagagaggggaggagcaggaaggagtacagggagatgtcaggatgcaacgaaggtgccatgccagcctcagctgaccccacaggggtccagtggggagtaagagttgtcccaagtcgtactgagacggctgggccttcacaccttcacacaaattagttattgatctaataattcctgggggtgagggctgccccaggaatgagtgtccctctgctcaaagcagctctctgtggcacaggcaatccttgcatgggctgagcgctaaagggtgtctgtgtctctgggttgggcatcatgatgtcaccataacatatattacatggcttcattcattcattcattaaaacaattcacatttattgtgcttttcctaaaatcagtcactgttctaggccctgaagggagtgttgaaggaaacagatatggtgttccttcactgtaggaagagcaggcccgccttctagtcaggagacagtcggtaaacaaggcagtgaacatgaaggtaccaggtggaatgggtgctctgatgatcataaatgggctgatgagatagctggtgattgagggaccctgagacacctgaaggtgcagccacagggagatctgcggcaggggccttgcaggtcagggaacggcagcgcagagccctggggcagacctaggcatggtgtgtttcacaacagaaacagagactggccagagcagagacgaggggaaggagatgaggctgaggcaggaattttagttttattctaagcatgacgggaggtagagcagaggggagcgttctagagagggcacctcctagagagtgcttagcatgtgctcatcccattctgagtgttttgcatgagtgacgcatctaatcctcggtaatcctatcaagtggctactgtcattatccctccccattttacagaagagggaactgaggcagagacatgcctaaggcccatggccagtgtcggagctggggacccaacctgaggaggccaggcttacatttctggctcccgatttccatgctgtggtcattgttttgaaaaggtggcctggtcaacatgtggggcaggaggagagctaggaggtcatttaggaggctactgcagcttggctgagtccgggtgagagggggtgacggtccagctctgaagagggagggaagtggatggactcagcctatgttgtggagagaggaatccaagatgactcatcgttttttgacttgagcaaatataaaacataaatatagatataatataggacatcttacttgttctttatttgacggcggtgtagggattgggaagtcttcaggctgtcacaggtccttcagtgacctggaaagaaaactaaactcacttcctgtaaggggcatggatttctgactaggaaccccttcctatctgctgtccccagaaattgtccacttttcaaagcttgattgtcctgggcccttgctatggccctggctggggtaagataaggtaatgacgaggtgcctcaggccccttcctgatttgccccccacccaaataacagcctggcacatgaaagttcatcagcatttagcctgttgccacctgtccttgtgctgtttgcttgcacctggtgaaaagcaaatatggaggttggcatcaccaatatgatagtgtttataccctgaaaggatgagaacgtcaatattaacagtgatttttttttaattttttgagacagagtctcattctgtcacccaggctggagtgccatggcgcaatctcggctcactgcaacctctgcctcctgggttcaagcgattctcatgcctcagcctcctgagtagctgggactacaggtgtgcgccaccatgccaggcttatttttttgttatttttagtagagacggggtttcaccacgttgaccagactggtcttgaactcctggcctcaagtgatctgcccacctaggcctcccagagtactgggattacagatgtgaaccaccatgcccagctaatttttttgtgtatttttagtagagacagggtttcgccatgttggccaggccattcttgaactcctggcctcaaacgatctgcgcactttgcccacttcggcctctcaaagtgctgggattacaggcatgagccatcacgcctggccaaaagcaatttgtttgggactcttgtttgccaaaaaaattcctctgtgtgtgtgtgtgtgtgtgtgtgtgtgtatttatatgtgtgtatatatatatacacacatgtgtatatatatatatatatatatatatatatatatatatacacacacatatacatatgcatataaaaatgtgtttttttaatactatgtgaggccttgtcttccattgaatattggaaagttggtaataagcttagctggtcagaagtgaaatgtgaggtcctttggcgaaaaagtttaaggagaaacttcggctctttgggtaaagagcatgcgtttacagggattattattattatttttttaattttaaagcaaggatataaagcagggtctttggtactatttggagaatttagacagaaaagaagaaaggaaaagtagtacctgtttacattttcatttccattttttcccctaaagctgtcctgcgcaacatggtagccactcaccgtatttgactacttatatttaaatttatgtaaattaaaatggaataaaattaaatattcagccctagtcatactggccgtatttgaagtgctcaccggccacgggtctactggctgccttgccaaacggagcacctgtggaacacgccatcaacacagaaagtgctattggacagtgctgctcatagccttagaatccaagagattcctggactcttggaggcccgttgtaaatcgtagggccccaggaacctaggagagaaagagttcttacagacaaacttacagatgaccctaaacatgaaacaacaacagtaacaaagctagctcatctacaaggaccactctgaagtcctgtaatctgaagatggaagtctcattttactggcccaggcaactagttcctggaaagttcggtacatggatgatttttctagctagttagtgcttgatgttatttaccaagatgtatgagaccttgttccttcgtgtgagtattttaacctaggccattatctttttgcaaaatgggtatagtcatcttaggggaatgtagtgtggggcaatggaatgtttttattacacctcgaaatcacagttgaatggtatttatagagttatactaaaaactatatgaactggctttggaagtttttgtttttgtttttgttgtttttttgtttgttgttgagatggggtctcgctttggcacccaggctagaatgcaaagttgtgatcatggttcatttcagtcttgacctcctgggctcaggcagtcctcccacctaagcctcccatgtagccgggaccacaggcatgcgccaccacactggctaatttttttttggatttttttgtagagacagggtttcatcatgttgcccaagctggtcttgaactcctgggctcaagatatccacccacctcatcctcccaaagtgctaggattacaggggtgagccaccgcgcctagcctggaaattctgcataggctgaaatttaagtcatgttacccattgctgtctgtgatgtatctggaccttccatttgttaggcagtaatatttttagtgtaggtgagaagttctgatattctaatataatccctagaaagtctgttttctagattataggagttggcaaaccatagttggagggccaaacccagcctgtttgtgtaagtaaagttttattggaacacagccactccatttgtttatgattgtgtgtggttgccttagccctactattgcagagttgcagaattacaacagactggcctgcaaaactgaaaatatttacactgtagcctttgacaaaaaaagctttgccagcccccagtccagatactgggtgaacgattggaacgcctttccagtaaggaaacatctgtgcaggtccaggtttgccagaggattttagagtagatgtgagatttccttattcttgggctatataatttagtagacaatagaaagggtaattacacattatacctttttggatgtcaaagacttttttggatgtcatttctcagcgataaccttactttctactttcactaaggaaatcttggagtttcactccaacaggagataattttcaccgacttctcatctgccagggtctgtgcccactgcctcccacagatgagctgttcgaactgtttggctgctgtctaaaggcaatgctgagcgcatcctgggtcctaccctccagccttttccaggccatcactccacctctctcccgcctgtgtcacctgatttgtctttctgctggattgctccatcaggatacacatgtccatcctctgaaaagaaacagacactcagtgaccatgttcatctcaccagctgccaccttcccctggctcctctgtgtgtaagctctctttcacagggccattggagctcgctgttttcaccctcagccattctcttttgaacccactctagtttttgccccagtcacttgttccacaaaagctgccttgtccaggccactgttggtcctctggttgcttagaccagtggtcagttttcagtcttcattatgcttgacatgatgacaggggtcttccccctgctccacctggcacagtctctgcatgatagctgggccttctctgttgtcctccgcccccaccactgcctgtcctctgcaggccactcctcgttcttatctcctgcacatgggagagcacagagttcagacctgggccctcttctccctctgtacttattccttgggagctcgcagccagttttatgaattgaaataccactgatttgcttataacgtccaaattcattcttccagccctgctctctcccatccaaacttcacacttgtgtatcagctgcccatcagacacttctgtttggatatctgcaagacatcttaaacatgacattggcgaaatgagctactctccacccacttcaggctgctacaccttttctagcccaggtgatggcaaggccatgctttcagttcttcaggctcccaacggtggaacattggaaccatattccccactccctcacctctctgtctctctctcactctctcacacatacacacacccatacccccttgccacacacacatcccaagtctagcttgctaggaaattctgtggacttttctcttcataaagcaccagaatctgccccctgctcactgccttcctaggagccaccatcagctctttcctggattgcaccaacagccctcagtttcctcaccaccatccttgctttactagagtctgttgtcaacacagtgagcctttacaaatataagttggattatgtcactctcctgcttaaaactcacccaagggtcccatttcccttggagtcaatgtccatacagtggccttgggcagcacactctgtccctcccgttacctgcccacccacgccttccctctgctccagctgtattagtctgttttcacgctgccaatacagacatacccacgactggacaatttacaaaagaaagaagtttattggactttcggttccacatggctggggttgcctcacaatcatggtggaaggtgaaaggcacatctcacatggcagcagacaagaggagagtttgtgcagggaaactcccctcttaaaaatcatcagatctcgtgagacttaatatcacgagaatggcatgggaaagacctgcccccatgattcaattccctctcaccaggtccctcccacaacacatgggaattcaagatgagatttaggtggagacacagccaaaccatatcaccagccatactgcccactgccttttcttaaacacaccaggaacatttttgccttgttgccctggctctttcttcttcctcttcccctgtgtctgttctcctgactcgctcatgtctgtcaagtctgtgctcaaatgtccattttttgtgtgatccacccagatcaccttgctctgtctgcctgcctgcctcctgcctacccccggttgcctggtcccactgaacaccactctacttttattttcccatagccgcttggtaacctctaacaaacactatcctttcctcctggtaaactctaatcttccagtgatggggatgtgtctattttgttgattgctagagtccaagtgtctagaccagggtctagctactagtccccagtacacagtaggagctcagtacatgtttgctgaatgagtgaaggggcctgattcagtctagtgcagcccttctttgtagcagtgaaggaatagctctcctttcttcttgaaggggggtgatgagttccttggagataagaggcaaggccgtttagctttaatttgtttttctgtaggtggtgggagtgggctatcttttcaaagacacatattccagaatggtcagtaccatggtatctgccgtcctggtcattgcccgaggagcttttacaatgactatggaattaagcgcctgcatctgggtggcctgcagtttgccttactgatatgatggtaagctggggtctcagcagaagctgcagggatgatacacaactttgttggcactttaggtgatgcacattttgtcctgactgtcttccctggagctttctgttctaagcagagcagttgagtgtgtggacatttgttgtgtgctgcttttggccgacatctcagctgggacacagctgggcccttgggcccagaggcagcacattcactgtacccctcagattctcagctgaatagcacctgaagttcttgttagcactgattttttccatgtcaagtttggctagtgactgagatccatgaaggcgaagccattttatcatccttggtgcaccaggatccagctggtccccacacttagcggggttgcgtgaatgttcatggagtcgtgagtgatactgcccctagcaaagcctctccagacatcatatgttagacatcccagcagcatgtgagcctctgctattgtcttactggacgagcccgtcgaggagacagggtgcactcttgcagaggagcacactgttgtttgcatcagcttcgctctattaaaccttccccttgcttatctctgctggcccatctatgttttttcacattaatttactcttccgtttgtcttcagtccccataacctttgaataagctgcttactgatgatcttccttccatcatatttaggattttgaatatctacatgtttttaagccatagaaatgtagaactggagctcagtgggcaaaggcttaagttctggatcagactgatggggctcacaaaccaacgctgccatatgccaagtgtgttctcttcctttttgcacttcattttcctcacctttaaacaggtgataattgtggactctgcttcattttccgcccttatatgaccttttcagtttcagttcccttagcttctaaaaggccaaggtcatgaaatctttctctttatttgaagttacagtcctctttatgtttttgatcattgaatatgtgacctcctgctgcctccgtctctcctccccactctgcatcaggggatatttctcaatatttgatgtgagggtccctgaggcctttgctgacactcctctccacctctggccactctctttctatcactctcacccacccctactagaatatgggctgcaactaggacatgtaagctctcaagggaaggacggagtgtccctatcactggagcgtcagcacctagatcagcccctcctgtaacaaagtgggtgttcagtaaataggtgaattagacagggatggataaatcaatgaacagagtcccttcttagctccgtgagaaggccacttcccattccagtctggctcctcagtttagtgtatgccttctattgaacagcttggccccctgcctggaaatttgggggctagatttaaaaagtgcctgaggggagagggaagcgatcctgtgctcttccttgggttccagcattgcctggtttcccaggaccctcaggcagggctgcactgaggagggctgggctgtggaccctggggatcaatatcccaccttcactgacctccaaaggagagcagcaaaactaggtgaagattcagggaatagtttctttgagggaatgctcactgagttaagttgtggaccttgtatttttctcaatagcctagggctaaagaagcagattgtcttagacccataaaagatgaggaagcagattgttctggcagagttcagactggggttggcaatcccgctatttgtgcaagccatgggcttgtgcctctctgggcatctgtttgcatgaattcatgtcttgttcttctgactgcagaaggaacaggcaggcccctggagagaaagagagagaggaacctgggtggcgttagagaagaaggtttagaaacctgagctgatagatctgttttcatgaaggacttcatgtgacctatgggccttcacaggatttgtcaggacttgtggggaaagtcctgtacagaactgtggagggggcattctctgtacctctgcttggaatccagctgccttctggcatcttggtggatctttgaggatatctttgggtcagcaccagcatatggggactaaagtaatggggtatgagtaaatgttaatcaaattgaaatagggcttcatgacaagctggccaggacatcagtccctgtttcggtcaccatgcctgacttgtgtgacaatcctcctttatcattctgtctgtgacttggagctcagttgacaagttcagacttggtgccagtaggagggtggttttgggccctgtactgttcagagttatgtgcgtgggctgtgggatccaacagacccaggcttaatttctggctttgctgtgtggccttagggaagtttcttaccttctataagctttggttttatttatttatatttattttataaaatggaaacaataagctcatggtgaggatttaaggaaatcaaagagataaagggttttgtacagtctgatattcggtagttgttactgttagtgttattatacatcatggtatgcaagttggaatccagttactcccatatagagttaatggtttttaatgtttatgctttttatataagtttgtttaaaactcactttcagccgcaaaagttttgtaagagagactactgtcatttcttttttttttttggagacagagtctcactctgtcacccaggctggagtgcagtggcacaatctcagctcactgcaacctttgcctcccaggttccagtgattctcgtgcctcagccacccagatagctaggattacaggtgtgtgccaccacgcctggctaatttttgtatttttagtcgagacagggttttgccatattggccaggctggtctcgaactcctgacctcaagtgatcagcccaccttggcctcccaaagtgctgggattacaggcatgagccactgtacccagcccctatttttccaaatgaagagactgagccccaaaagggtgaagtctgtttcctcagcttatacaactggaccgagggatggaaggcaagcatttcggggggactggcccagtgtactttattcatgctagcatcaatggtgaatcccaacacttaaaagcatttatcactttgttgatcacagacacacagacacaccaagtaccacataggtggtgtgtttttgatcagctagtctcagggtctctctgggaatttaatggactcaaacagttgcacaaggtgcgactgtaaggtaacagacggcatttacagaaatcaggcaggaaagacaatcccaccgcttcatagacatacttcatgtcagcatgggggcagaggttctactgagagctgacatctatagaacacttcccctgcgcatcctcacttaatcctcccggcaagcccactgctgtttccacgttttacagatgaggaaatggcgctcggggagttcagtgacttgcccgagctggagctgagtgtagtgacagagccaggccttgaaccctggcagccagactcctcgcccgtgccgtcaccctctgtgcggccctggggggcggttgatgaacacagttcatcaaaaacgaactgtgatccgacagatgaaagccgaggtctgtgaacatgtgaatgttcttttgtgaaccgaaatgtgcttcagttgttttctctgtgtgtcagggaagagcgaccatgaactcccagctcgttgggcaaagggctgatttatgaggatttgctcaactctaaccagctggttaacaacacggagcttttaacgtttccaggggaggaaatgaataaacaggcatttgggatgaagtccactgagtccgcgggactggctgaaaggtgaattcagttggaagaagttttgacatacaatgcagacatctcttgacccagttttgaatcagagttctcagtaaacaaagtcaggaaattagaatttctgggtcaattccacatttcataagcaacgtcaaaagaaatatttattttgtgggaaggttacctggtttaggtggaataagtcagacggaaaagcaaaattagttacccagatgatgggtgttctttattgattttaaattcagtaaaattgccatcagaaattctcaattataacatttatgttttatctagtattttaactataaatggcttgtacatatttgagagtcttttatcctatggaatacttgaaaccatgctgcatttaatttaattttttttagaaaatcaaatatcaccagctatctgctttccatttgccttttggccttttggaaaaatacaaaattaggatattttggtagaattaacatagcaggccaaaatttctgtaatcctttagtgatttctcagaaataaaagccatgtggcagtggtcaagcttgtgcccagcataaaatgactaaaagtgtaaactggtaaggggctgatatagaccagctctgcttctgttcttgagttctcttagcgtgtactttgcttcctcatctcccctgggtaactcccctgttgcagggaacatggacccttcctgagagccagtggctgtgctagagttgatcatgttcccaaagagttctctgagcttccttctgctttgggggaatgagaggttctgaaagtcttttgtgctcgtgaaaggagcctggtttagaaggctctcatcagactctggcaggatcattcaggttacacataaaaaaagggaaagaggacaggaaaatacaggaaaaaaatgactggagaatattataatatttatttgcttctaaatcagaataaatgggcagctttccacaaaagccaaaatagacagtaccctcgttacctggatctgtgcaggacattcatccattcatgctgctagttttattgcaaagactgaacaagtcatattaatgcaattttaaaaaaatagggccagactgggctttagaaataagtaacttaaagttgcttgggacatgaggggacatgaagagagagaaaagatttctgtctctgtgttaggcatttcaactgattcttttagaatattttttgcccgccgtgtctgtcaacgatggcttggctaatgcagcctagtgctcgtggaggttgcatctctccaagtcagccaggcatcaagtatttcaccagcacttatggtacatctacctgtgggagaatgcaacataaaaatatacccgtcgttgtgacaatttgacttgcagggaagagtaaggtctacagtgtgctcagtgggctaccctgcagagggcaggcactaccgggtaagggcactggacttcttgttcacttgtccgtggtcctttctctctccttctgactgctgcttcccagggatggggtttgggctacttcatcccaagtctgttttcataattgtaaaatgtggaataatcttcataatttgcaaggttgctgtgagagtgatattaggtagaaggtgaatggctctttgagagtcataaatggcttgtgctttgttaaatagaaggtgataatagccaagtaatgaaatgtgttaactttactcacggaaaactctcagctccactgctgaaaactcatccccttctcccaggcaaccatttggaggcccaggccagaggctggaccaggaggattggatgcatccgcgctgtccatccctgctgctgcacaaacgactcagccacagatcctcttggatgggctaccttgaaagggggaagctccaaagaatgcgtacaaacccatacatttacctaggtgcgggatgattgcaagaccactttattcatttaattcatttacactttttagtgtaaaaaagtttatcctttttcatcttactatctaattctgctttttgatagaaatgccagccatgcaaattctcctctaccacagaggcagtgagttaagacatgcggatccctcttttctgtttgaaacccatggctgagatctcatgggtgagagcagaatgtgcatgaatcctgcaggcacccccaccctctgccctttggagcagttaatattgttttatgttcccaagtgaaaacttcaagatttttttttaaaacttctcttatgaagagaactacgaaggagataacgggcctacgtacagaagaagcaaattaaaaagaatttccaactcccatgtcactatgtttaagcaatgtgaatacatccaggagtagagaaaagactagaaggaaatatacttttctgttcaaaacccatagctgagatctcatgcatgagagcagaatgtgcacgagtcctatagacacccccacccccgtcctttggagccgtaaacattgttttattctcagaggcaatgtgaaggtacattctgttcaattttgttgggaaactctgcccccaaataccattaaaatttctaagaaaaatagataaaaacagatcatggcacagtcttgggtcttttctttattgtcacctgtattttcaacctccactatggattataaatgccagagggctgtctgcagtgacagaaggaattctctaaggactcagtgacttagctttgacctacatttggaagaaagctttaagaactgtataaacttgagcaagttgagaagctgcaagtcccagggccttcgattaccagacgtctaccttttttctccccgcattttctgtgtcctgtagcatttgattatggtttctaataacaaaagcaataatcattgtggaaagtctgaaaaatattgaagaacatagcaaaataaaacaaatattagccttatttcactattcatgtgtggatgacaattgttaacattttagtacatttccttctagtcttttttctacttgtggatgtattcacattgcttaaacatagtgatgtgggagttggaaattctttttaatttgcttcttctgtacttaggcctattatctccttagttctcttcataggaaaagttttttaaaaaatcctgaagttttcacttgggaagaagtgttaaaatgtcttgctaaatgtctatttcgtgaagcctgtgacagtggacttgtatgatagaaaaggccatgaaatcacatctcatacagacttctgaacaatcttgaaaatttttgcaatcaagtctagctttgaatctaacacttattagaagctaaggtgagatgcaagacagtgaactgataatacagttcctagagctgtatagagtcagaagagctggaaagtgaggtgagtggggaatggaggacactgcacaattgttatagaaccctataattttacatagaatgattaataaataactgtgtgctgagtcaatcagattgttgctgcagggagaagccacaaaaagctcacaggttatattttgcctgaggaattagggttaaactgggcatgagctcacagaatgtctaatacctccttcccacccctacaggggatttaggaaagaaaaaaataattctcaagcaaatacttgattgtggcaattgtggtgagagtgctggcatctcttttatttaccattaacttgtatttcagaaagaccaggtactttcttaaaaagtcagcaaggccagacgtggtggctcacacctgtaatcccagcacttcaggaggccaaggcgggtggatcacgaggtcaggaggtcgagaccatcctggctaacatggtgaaacctcgtccctattacaaatacaaaaaattggctgggtgtggtggcaggcacctgtagtcccagctactcgggaggctgaggcaggagaatggcttgaacccaggaggcggagcttgcagtgagcggagattgtgccactgcactccaatctgggcgacagagcgagacactgtctcaaaaaaaaaaaaaaaaaaaaaaagatcagtaagttctctgtaagaactgtaatatttaagtttgaaacagccctgataaaaacacatttatttctacattgagaagtttttaaatatatacatatgtgtgtgtatatatatatatatatatataattttttttttttttgaaacacagtcttgctttgtcgcccaggctggagtgcagtgttgtaatctcagctcactgcaacctctgcctcctgggctcaactgattctcgtgcctcagcctcctgagtagctgggattacaggcacgtcccagcacgcccagctaatttttttgtatttttagtagaggcaggttttcaccatgctggccaggctggtcttgaactcctgacctccgcctgccttggcctcccaaagtactgtgattacaggcgtgagccactgtgcctggcctgatttttttttttaattttagcaaaatattggaaaacacagtaaatataagaagtaattgaatattacttcttatatttcaattgattgtaattgaaatataagaagtaattgaaatataagaagtaataagaagtaattgacttctcacagataaccatcactgctaacattttggcatttgcttcctgttcttttctcttttctctttgcttctcttcttttttttgtgctttgtggacattattaatcttctattgttgggcatttaggacttttacttgctctattataaatattgtttcagtgaacatccttttagggaagtctttgcatagaacctgaattacttctttgggtatgtacccagcaaggggaggattgggccaaccagtatatacatttaagacttgtcctccatatcatcaaattggtgtatgtatatgtgagtattcaacatgcaccaatgctatcctgctaataacagtgcatgctccttattaaacctttaccagcactttttcgtttgataccaagacaaaaaaatagcatcatgtttcaattttatttttttcataacacaatgaaatacaactatttttcattttcatattgcacatttaaatttcttcttcactgaattggctgttcatgcacagtttgaggcggcttttttgatacagagtaacattttgttatatattgcatatgtttgaatatatattaggctgtctaaaataaacagctgtaagtttcatattttagaaaaataatggtgcttgtgaatgggtgcacagagacagatctgaagcagacattgaagggctgtctggaagttttttgaattgacactttccattttataccaaagagaatatgcatgtagaaaaggacacatctcataaatgggcagttagataatttctcacaaaccaaacatttgtgaagctagaattaggctcaagaaacagacccattcagcaccctctagcccatcttgatttctgacacctaacagcatgtattttattttttatttttttgtttttaatttttttgagacaggatttcacttcattgtccagactggagtgcagtggtgcgatcacagctcactgcagccttaacctcccaggctcaggtgttcctcctgccttagcctcccgagtagctgggaccactagtgcgtgccaccatgcctggctaatttttaaaacgttttttagagatgggggtcttgctgtgttgcccaggctggtctcgaattcctggcctcaagtgatcctcccaccttagcttcccaaggtgcagagattgcaggcatgagccactgtgctcggcctgttttcgaactttatagatttgttttctttttgtgtctggcttcttctccttggtctacattatgtttacgagattcatctacattatatgtagttgtgcatgttcatcccccttggtgtatagtattcctttgtgtggctatatcacaatttatgaatctgtcctactgctaatggacatttggtggcttcacatttttggttacaaagagcgatcctgtgaatattctgctacatgttttttggtgcccctggtgttgggagtagaacaatattttcacaaactttcttgtgcccacatctttattctctcctctcccctaacatctcttgagcaaagtaaagaacagcacagacttggcaatgcacagtgtttttgtctttccttgacgttacttttaggaaggatgagagtaatgaagttttcttaacaaggtactgagttctgatttaaattgtagataatgactgttggcttaagaccaggctatcatttctaagtgaagaattatgtcttatgtcttgttattttcttctttatcagtttttcttgatttactctagtaaatggaaggcttttgaattgtcttaaaaggaaggagtttattaacttgttggtcttataagcaaccttcctaggtttactagcttaatgaaaaacaatctttggggtaagaaattggattcaggccatgtgcatgcatgagttgagtttgagagatgtaccaaatctggatcctgctgctgtgtgatcttttggcagaattaaatagaaggcattaaaaatttttatagttgctttttaccagctttatgtctgattttttctctctctctaaattctttggctgacatgagttttgaagttctgccatatccacttatcagcctgtggcaaatgcagtccttaccaacatcaagatgaaaggctgatagttaagagaaaaaaacaaaagcatgtgctacataaaaatgccctacctttttaagaaattgccagagttacgtttatttctctctctctttctctgtatgtatacggaaaaagctaaattgttaaatttttattctttaatctttcaagtgtatatatacctatttaaaatttatcagtaattcccaaacatatctaaactgacaatttaataactcaaggagggccagatatttgctggtgtgtttccaattttatgggtatctctgtaaactatgaatcatcttgtacttctctcatatgcatgggctaaatattaacctccacagcaactcccttgagcatggaacagatggaaaatcaatgctgggagagaggaattctgtagtatggtagtttgtgtccatttgtcttgtccttaatctgtttgtttattttcgttcccattgcttactgtccttagcattttgtcttccactaaagaacaccagccttaagttgatgaatagcaatatcatgttcttaggtgataacctggcaagcgctaacagaggcataaagaatcagaaccaggccaggcacagtggctcatgtctgcaatcccagcactttaggaggccgaagtgggcggatcacctgaggtcaggagttcgagaccagcctggccaacatggcgaaacccggtctctactagaaattacaaaaattagtcaggcgtggtggcatgtacctgtaatcccagctacttggaaggctgaggtgggagaattgctcaaaccccggaggcagagggtgcagtgagccgagatcacctcattgcactccagcctgggtgacaagcatgaaactccatctctaaaaaaaaaaaaaatttagctggtcatggtggcgtgtacctgtaatcccagctacttggaatgctgaggtgggagaattgctcgaacccgggaggcagagggtgcagtgagtagagattgtgtcactgcactccagcctgggagacagagtgagaccctgtctcaaaaaaaaaaaaaaaaaaaaaaaaaaaggaatcagaaccaggctggcagaatgctgccataagagacttccctctgcccccttctcctctgtttgttgtccctccaaccccccaactggagctatgctttcacttttggcatcttgtttcttggggccccattgccaaggcccacagggatgctccagtgttattccctctggggcctcatcccgatcagaaagatgcctgttgttttggccacccttggaagacagcaagaacagcaacagcagcaaacgtatactgttgcttccagacactccctggaagtcccaccacattcattcaattatttattcatctgtagaatacttcactagtgcctatggtgtgcacataagagatagcagagtactgaattccagcgcctgccctcaaggatcttatagtctagtgatggagacatacaagtgaatagctaattaccaaacaaggtaagaaatgctctggtagacattgggtggaaagttgagcaggctcagaagatgggacagaaggggctgaggatggttcttcatgctcagagcctctattcaggctgggcagtttggagttggtcttgcagacacctgggcttcatgcaaggtttgtgagcctggaagtgacatgtgcttctagaagatttttaggaaggggagcatacggaacaccgtaacttttaactttgcttccattttcactaatctgtgacaagttggcttttgtactcttgacattaagatttaatatatgcgatttttggatttgccaagcatctgtttcccaatgttttggattttcatctatggttttatggttttaactttgtttgcaagactagattctacatttttgattgaattatttagaatattagtatactcagtgactttacaaaattgacttgcccacgtttaagaggcattttagatgtttctttctgtggtcagctcaggcaggtacaaaagaagttcaagacttgatatcactagcagctagttatagacaaggcctaaacccagaacaagtagggaatgagacccccaaatgcaccagcagtctatttgatttaatggcatgataaattgtatggtacagttgtgtcttcatgacccaatcagtgaaattaaactaatttgttacttcttttctgatgtttaagtgtccatgtggaaaaatgtttccatacttgggcttcaggaatatgtatttctaagggggtattttaaaaatatcctcccagccccatgaaaaccctgatgtttttgcatattatttgaactcttaaaaccttcatgtagaaagatagttcacattggataggtaagtattataccagaacttttgctggtttctgtggtttctatagtagggatgcagggacactataatgccaaagatttgtaacagatctgctataacccaccagagagcgcaccctactcaatagtgatttgttttttctttttttttttttggacacagtttcactctgttgcccaggctcactgcaatctccacgcctggctaatttttgtatttttagtaaatatgaggtttcaccatgttggccaggctggtctagaactcttgacctcaagtgatccacccgccttggcctcccaaagtgctggaattacaggcacgtgtcgctgctcctggcccatgaatagtgatttaaaagcctcatttcctttatgatcatttcattattgctttcccttgcaatgttaagactgttcctagaatgaaagatttcattacaaaaaaaaaaaccaaaacccccttttagatttttttaatttttatttatttatttatttatttgacacatagtctcgctctgttgcccaggctggagtgcagtggcgtgatctcggctcactgcaagctccacctcctgagttcatgccattctcctgcctcagcctcccgaatagctgggactacagccacaggccaccacgcccggctaattgtttgtatttttagtagagatggggtttcaccgtgttagccaggatggtctcgatctcctgaccccatgatccgcctgcctcggcctcccaaagtgctgggattacaggcgtgagccaccgtgctcggcaattatttttatttttatttttatttttttttagacaaggtctttatctgtctttcaggctagagtgcagtggcatgatcttggcttactgcaacctctgcctcttaggctcaaggagcttcccaccccagcctcccaagaagttgggactacaggcctgcgccaccatgcccagctaatttttgcatgttgtgtagagatagggtttcaccatgttgcccagttgttctcgaattcctgggctcaagcagtctgcccactccagcctcccaaagtgctgggattacaggtgtgagccaccatgtctggtctttagattctttaaacagatttcaacacgggaatatacaactatattaaaacaccagctttcaaagcttgtccgtatattgcaggggtatggacaggatgtgtcctagtgattattttttctactcagccattaaattagaacctgtgtttttgcatgcattttggtgtttttctagcaatgaatttcaagtctatccagatagacccattacaaaaggaaaaaaaaattgcataggcttggaaagtaatattttaaaaccattcagatttcaaagattgataaagacaagtaagcaaaagattattacttgaacagagtggccggaagactgaagcatcagcacagtaaggaagccattaaattggccaaagaacaatccttagaaacattgtggaaaactttaggggtcaagtgcaagccagacaaagtcaaaaagagagacactggggtcatgagatctatgatgtgcccagtggttgtgatgtgtaaaaaatagagatggtacatggccaggcacggtagttcacgcctgtaatcccagcactttgggaggctgaggcgggtggatcacctgaggccaggagttcaagaccagcctgaccaacatggtaaaaccttgtctctactaaaagtacaaaaaattagccaggtgtgctggcgggcgcctgtaattccagctactcgggaggctgaggcaggagaatcgcttgaacccaggagatggaggttgcagtgagccgagatagcaccattgcactccagcctgggcaacaagagtaaaactctgtctcaaaaaaaaaaaaagaaaagaaaatagagatggttcattagatagaggcagcgttgaattcaacaaggactcagagtgaaagggtagagacaactgcagttggggaaaaggcaaatcagagagaggcagctacagagcagaggcctgttgttgatggagatgagcattctttggcagtgtccggaggggtgtgacaagcagaggtgagatagaagagtactgtttaatgtggggcaaagaaaggcaggtgtatagagatagataactcttggtttgagtctgagtaatttatgaggcctttggcaaggaagactgtgacctgaatattacagaaggaggtcagtattgcaaaagatcagtgtttggatggaagatatctagtttgtgaggatagttgttatttgacaggaaattccaagtttgccgtgtagatttgaagataggttgaaaatacaaaaaaaaaaaaaaaaaaaaaaggtgtttattcctccttcccctggaccactcctccccaggacttcagagacagtaatgcatagaaagggaaacagaaatgaatttcctttaggcaagagagctttgtaaggccgagctacttgggagccaaggagaagctgcttctttgtgacaaagcaggggttgaagttgcagtggttgctaatattctgctgaatgagctctgaggtgcattcattttataggaggggtggtttcgttttctagctggtccatactaagatttttatttttgtctacaggcagtagagtagataagaggaactcagtagaattgacagaattgtcaggcacagtaacacagccttgattatgtctttcgtttgccgttttcatcaactcttcttgggaactttcgtagaactggcccagacaatgtgattaggatggaagagttctttgaatgacttggcagcagtgcagtgcgaaatctattattatttctcttaaagtttttctgccaaaaaagtacatttccatttgtgtcaacaagatgtgaattaaagaataaagaaaaatgcagaaaaaattacatgtgttctcaacttaaaccaaaggtgcaacattttagagtatcagagtagtcattgagactgtaaagttcagttgaatctatccctgaggggttgggttgagatcgcagcctctttgaaaatttgaactagagactttccaaaccaattcttgttcaaacctcctctacaaaggtaagcctggtctatccccccacagtcaaaacctgaagaagaggcctttcctctccatggcctttacctaatgtttacattactgcttaccctgtgttaaccctgtagcctctgcgtcccttctcaggtagtttctcatctagaaaaatcagtaatgtgggccttgagggcagcagccattctgtttttactccccttagaaggtcagggttcatgctgggacacacggagcccttgacatggatgagtctgtatgaattgaatgtgaagaaccaacctgggctggtttgtattgtttgtgttgactcagcctgctctaaaccctattacccaatttttgacacaagaggtggaaacactccctcagaatcctgactacatttgtttctgcctctagcaaggagtttcccaattatgtgggaagaggaactctcaaaactttattcttggatatgcctctttcatccctattaacaaatgtatgtgccacactaggtcatataattgtcaggttcagaatcataggagactgatttgatccctgacttactaactttgtgactttggagaagttaatttctctaagcctatttccgtcatctgtaggatgatattgctgtctgcctcatagttattttaagatttcaaagcattcatattaaatactgtggagatgatagttaccttattttttgaatatttttcctaggtgtgtttcatagttttactaatgggtgttgttgtcatatcctgagacaaggtaggtcagaggacaacacgacttttctgcaaaagaccagctagtaaatgttttcagattttaacaggcgatttagtttctatcactactcaactctgctgttgtggctccaaaacagctgtagacaacatgaaaatgaatgagcctggctgtgttccaacaaaacattatttatggaccttgaaatttaaatttcctatcatttttgcctgttgtgaaatattattcttcttttggttatttttcatccattaaaaagtttgagatatatttgagctcacaggctgtacaaaagcagtcagaggatacaggttgtcagtaatcaccctaaaataatttgcttgatttttcttagtaaatattgtttatggagaaacaaaatgtattcctcgggaaaatttcaagtgtctcaagtcactgtagaaaaccaagtagaagggattgatgttttcaacagatatttgaagaactaagcatacttgtctagtaaatgttgatttggggcttgaccagagatacgttgaagaagtgggtaaaagagatgaccagttttaattatagattattaacttggagctttttttctggttgtaaaacagcagttattccctcctaagctgtctatcctgatgcttggtgaaggcgtccactggtctgttgccttagaggttacggagctctcttctgcaccatcctttttcctaggacatctatgagaagttggctgaagttgataggagatgtcccattttatataaggggaagcagcagcccaaagaaattctgtgacttgcctaacattagacatttctagcagtataggttgggcatccctgatctgaaaatctggaatcccaaatgcttccaaatctgaaactttgggagcaccaacgtgatgccacaagtagaaaactctacacctgatctcatgtgaggggctgctgtcaaaactttgtttcatacacaaaattattagaaatattgtatgccgtgaccccaaggctatggatatgaggtgtatgtgaagcataaatgaattttgtgtttagacttgggtcctatccccaagatatctcattatgtatatgcaaatattccaaaatctgacaaaatttcaaatccgaaagacttctggtctcaagcattttgaataagggatattcaacctggacatccaaggcctggaaatccaatgcctggcccagggctcaattatcttgccaccctgttttgcattatcacacagattatcaggttagtgatagtacctagctttcataaatgccacagtttataaagctctctttcatatgctattatgtttaaccctcacaataccctatgaagtaagaggggcaagttttactatctgcctttggtagaggaggcagctgacaacctgatatattttaatgtaccctgggtcacataccgattaagtgctaggagcaagtctgggagctaggttttctaactccttttattacactgtgctgccttattatactacatggcagttgatgccattaatacccaaacattaaaaaataaattgaaaaagaaataacatcctgccatggttccagcccttggcagtgatttttaagtggaggtttgtgttatgagaatttttgctttcaaaatactgcatgcacctcctgtaaaaggttgaatgaaatgattttagttttggtaagtggcccatgcacgtttattatttatttatttaggtcttttttgctccagctcctttggctaaatgaagcactgctgtatttttattgcataccccatcattaaaagaaattgaaaagacgcttgttagttttaatatcgcatggatggaaatatatctggcacatttaggaacagttacaattcctaatagtgcattttaagaagtagtctggttttgttcttgattaaaaaaagagaaaactttcttaaatttgctataattcgataatcatctttagttgggaagggagaatgtctctgtgttgtatgattctgactttattgactcatttagcattcctttccagccagtgggaagggattatactcttgggcagcatgaagggcctttcatttgttggtaaataatccaagcaaagctgcttccaagtgcaagtcttttttcctttttctgtaaaccatatgcttctttaacttttggacatatgcccctttcaataaactatgtgcggctctaactgttggagctattgttaagttaagcacaagccaaatacttaggctgcttcttgcatctaagcgttcatcacagtccccctgaagacagtgttttttttgtttgtttgttttgtttttttgcaaaatagctattcagaacctggaaaccctatagaaatggggaggtgtggggagaaatagggtgacaagaagataatttagccacagcatgagaggtgtcatttacactgcaagatactaaatgtgcccaaggcctgagcttgacaaaagtaacaacagcgacaacagaagtagaatgagaaattcgaagaagtttctgaaccatgtttcattcatgactctggcttaaagtttacagttaagttcgtttgattaaagtctgtagtattcttcctgacggcctttagaggaagaggcagaataattttaacaatgaaaatagtcttcagctgggcgcggtggctcacatcacgcctgtaattccacactttgggaggccgaggcgggtggatcacctgaggtcaggagttcaagaccagcctggccaacattgtgaaatcctgtctctactaaaaatacaaaaattagctgggtgtagtgcttggctctctctctctcatgctactcaggaggttgaggcaggagaatggcttgaacctgggaggcagaggttgtagtgagctaagattgtgcctttgacctccagcctgggcaacaagagtgaaagtccatcccaaaaaaaaaaaaatagtcttcacatgtacagatagaacagtggcaagcaaatgaatgctctcaaaaactcctcacagaagccacattttaggggttaatagtaatttataatacaaaggaaagtcatgccaagctgggcacttacctgaagggtgactttaagccagtcgcttaatctttgttaaacctcaggacgtttagctgaataactggttgatgatactgcatcctggacaggtctgtgaagattcagtgggattaacgcatgtggagcacatagcactggcctggcgtttagtaagtgctcaataaatgtgaggcgcagagtatagtctagtgttgttaacgcatttcccatttatgcctttccagagtgggctggtaaaagctgagttaacaagttttcagggagggaccttagggtatttttgacattttggggaggtgtttgcatatgcataggagataattaaaatgatataattttacataggctaatttatcaaaatgatataattttacataggctaattttacataaaatgacataattttacataggctaatttatcaaaatcttttaaagtcctataccagcggggggtgttattaatatgtgcacacctagcctcctgtatcttagctatgttctattgtttcaagggatggaataaatagtttaaagcaaggcttcaacagataaacttgtgggataatttttcaatttgtatgtacttaatttgaacttctttagataattatagtaaaggtcatacatagaattaaaaataaaagacaaacaaatcagctttttctgtactctaaatgattgagaaatataagttaaaaatccatacaaatatttttatgctaattggtgcatttccttgacatttttctttttgtttagaaattttgtatagaaataattatatatttctcttcctcccacttcctttcgtccaaaaattcgaatccttaaacaatttagagacatggcagcctggtggctaagtgagtgaactcctggggctgtggtgtgaggaaggagagcagctagcgtcatgtctgtggccatgaaggtgtgctttgtgagaggtgaaattttgtggcctttctctcctccctcataggcagtacctgagccattatctgagattttgtaaaggtacagacttttgtggctaactcactagaagcaggctgcttagatacaattgtgaagaatcaaaaggtggtattttcatttgggtttctcaaatgcacatttcatagctgaggtcagtgggccatagctaaagggggtttctgttgcagaaacctgacccgggcagcacctggcctttgcccagaggctgattgagtgtaggtgagccttgctgtctgtccctcatgggggtcatgtggcctctagctccttttggtacaataatggtattatcgtgatatttaaatgcactctccaggagcgcctgattcctgcaagggcataagcatggtctctaaaatgttattaaaaatataataccaccatatgctcaggctttctcattccgtgatcttctaaaaacaaaaacatgcaacataaacacaccagatgcagcccattaagtttgtgttcacttctgcagtttggaaaaatgttagaaaggttaggaaatagaactttgctggtgatgggaggagggtgtggacctgggaaccagcatctgaaagcactgccaaaggaagaagctgctgcacacagaggtttattccttcgtgcctttaaaggaaaaccaagctgtaagtcctctggccacacaggggctgggccagatctccagagtgataggatcattcccatcggaggatgcagccaggtggcagcaacctggacactctggccttctgaacaggcctgtcattgtttctgcttaactgttggccgtggatctcgttatggaatcttaactgctcaggtctgtatgtgcaaagtaagaaagagagactcttcattctttgcttgtcaaagactaaaactgaattctcaaagaaatctcgaatacctaaatgctcatgagactgtgactcacagagagagatagtcataaatgtgctaccaagcaaaaggcaaaatttttgaccctccagggaatttattgtactgcctttgatgccactaattaactcactctgtgtaagcagcgactggcaactaatagcagactaatagaagaagctccatgacgttgttttagaattcttaattcaagaaagagtcttggcaagagcttgaaaaataaggtagatctcctcccttttaaaggcgaacccgctggggccctcaagggtactgttttgtttatattttcctgttctcaagtgcatgctggatttggcaagtctttctgtagggagctttgaaagatggttagtacccttgggtttgtgcttgcacttaagtgcctgttcagggcagtgttcaaccaggtcacagcaatcttcgctgacctcgtcatcagtgttcagaagcatcctcccgggggtagagatggggctgcagacctcttatttgtgagggttcaggggcacaggaaaatgtatggaaaccctatgggctacagggcatacttgctgaagcttcagacaagctgatagtgttatctgctcatcattgtcattatctttttaaaaaaaaaatacaggaggcagcttgctctgcatgccatcaaagctttctgctgcagtgaggggaacagccatttcaggttttacattttcgtttatctgaattctcatcttgctctctctgcccactcccttctatcccagggacctcttttgaagttgaatggagctctgtaaactgagcagttggggagtgaggtgagaattttgccttggtttgagctctaacctgctgctctttggagcaaatggtttccagtggaagccattgggatattggtcagtctagattatgttttattctttggtaaaaagaacagtagaaatatgaaaacaattaagctactctatggctctgatggagggcattttctttttctttctttttttttttttggagactgagtttcactcttgttgtccaggctggagtgcaatggcgtgatcttggctcactgcaacctccgcctcctgggttcaagcgattctcctgcctcagactcctaagtagctgggattacaggcatgcgccaccacacctggctgattttgtttttttagtagagatggggtttctccatgttggtcaggctggtcttgaactcctgactttgggttatctgcccacctcggcctcccaaagtgctgggattacaggtgtgatccaccacgcttggcctgatggagagcattttctactttctctcctttcaccctgggacctcctggttggtgaaagtaggaagagagagcaatcccataatctttgagggagagttgtcacttgaatttccccaaggcttcaaattctgctgcagccctctcatgttgcaggcctggcagtgcagtttaaaggttgcaaacaaagctgagtgctttctcctgatccatctgggcccctccctctgtcatccgtcattgtcaatgggagatgtatgtgtagctgcacaagggcaaagtctgaccccgagggtattggaaatgttcttagagtgggcattgtttgctcacgccctttggaagccaagctctagacattctagggagcagcccctggctttggcagaactgcaatctagatggaaagaggaaatattctgctttttaaaactacaggaactttattcccccttcctagcgtaattctgcaatgcttttgaatatacttagcctcttctctttttcatttctgatctctctttggtcagtcttggggagaattctgaaacagggagcgaggacttggattccgttggtttttattcaaagagcatcaacatgtaaataaccaaagaaataaaagctgataagatgcaacaaatgaataataggaaaaaaatgaaataatgctctttgcaaacacagcgaagcaatttcctgggaggaaaggagagacgattatgctctgtgtcttgttcaggacaggagggtggggccccaagcttctggagacacattaaaaatgcctggaacacacaaagcccctggccgagtcctggagtgcggtggagagggtgtgcagtgctgagtggggcctgtgtgtatctttgcgcgtggtagggggaggattgcacctgtgcgggtcctccacgtgggtccagtgtctccccatagatttgtcatttgggcttctgtcggtgtttcccaggagtggatttatgttgtcaaaaacttaatgggagagtgtctcagttttgaaattttctgtgcatagcaatgtcattccttttctttttttttttttctttttactggtggtagtagtggatgttggggcacatatccaggtatcattccaaaagcctacccaggaacagagctcttgtcctgttaacaggggacagggaggtgtggattcagtaaagcatactgggaagtttctttgcatcacttactcacctgggacatgacggctagtttctgagctgggcctaataccttgtcctaccgccatcattgggttgctgtgaggatcacatgagatgatgtaaataatgatgggaaagggttatttcttttcttaaggatggggaagatgtttgcttgtgaggggtccagattagtcaacaacatatttatggagcctcagtcctgtattttaattcatttgaacgtgactttattatatcattcaatatagaagttacaaggtttcacaaactcagaccttaaatatggaaatagtattttcttgttagaatctcatttggctagaaatctgagtatcctccggtctttccccccacccccccttaacattttgttgcctcctccctgcccgccccatcctcccttcattttggctggctgcaacctgagtgccacttttctgggaaagcctgatattctgacttcagttttgtaatttaatgatggagagtttccttagtaaaccaaatttagagtcctagaatgcttatcttatatccagaccttgaacataaaaggcattttatacccgcaattgttcatttaatgagcaattgcagagtgcaggccggttaagggattgagctatatgcactattattgcaagaagtattccgaaataccagaaataggacgtaagctctgatcagggagactgcgagcacaattaccttcttttcaaatccttctgtgacactgcgggaggaaaaaggactttgaaacttgaaaggaaagagcttgctttcaacctcaaaagctaggaggaaagggctctgaaatttgctcagaattcccaattcaccattagcctgtttcttcctttagcctcaaggcattctccgctttttgaaaagatgttaagaaattcagtcacaatagagagcctagttttgaacatgtttcactcggtccattgaggtctaggctccagcctttgtgtggggtgaattgagctgagcggctagctggttggagagaggtgaatgaggagtcgctgtgcactcgcaaattctggcaaagaaaaaagctcaccccttcctttattttacaatatgcattcctgtacaatcctgctagtggcaatatgtggagtggagcctgttcttaagtcaatacagagtacttggtttatagcaactcttgttaagtttgtcttgtaattgaagctgctgttgaccttgcttggggaccatttgtaaaaccgtttatttagcataaactgaaataataaaccctccttctctcaggctgattgtgatagggtgacattagtttgatttaatgattagccgcctgacccttctgctggagagagaggcttgaatagggagagttcactcggaagcactcagaaagaatactaatgagcttgttaaatttagcatggctccaaccacttttaattcctctaatgggagcagcattgcctgggagagggagagggagagggaggcagagagataccgagaatgttcctagagggtctgcgcagctagagagagctcaccaagagaagttggcgcaaagtagctagccagagcctggggactgtgttgtaagtattgtctgttctcttatactccgcatcttctaggtcttgggacaagagaggagtagtgggtattaaaatgggttttaagggaaaatcaatgttaagtgggaaaagggggtgaacacgtgtactgtgagctcctaatcagctaattttgttaggtgacaggaggtgtccttagttagtgatgcctggcagagttttgtttttatcttgaaggaatcacctgaaacttttctttcaagtcatggacagaaaaaaacaaaacaaaacaaaacaaaaaaacccgaaacctgttccctcggttaccatgagaaatcggatagatgtctgtctgcaagcgcccacaagtgcgtgttcgagtcctgcttcatgcagcaacgtgattaccttctccagacttttattgcaaacgtcctaagcactgcttgcaaggaccccacttttttttttttctgagtttctagcaccaagaatatctgacttgatgtcacttgcttttggatgagtttggaaattctgggacagtttctaaaacgtgatgctttgggcagctctctgggggcagggatttgttaacttccacttgagcatggatatgaaaagagaaggaggtacaaagtgggattatgatgacagtatttaaagtcattttttcctgaaagattttagtgaattgcatgtttcggtttgacccccgagcttgcagctgttaaacatagagaagcgggaacagttgccttgtgtttggctgttaaagtccattggcagatgctcttggagcagtgggctgtttgcttacatttttgcagcagacttctgcctgttgccatggtggacagtgtgtttctgtcaataatttggcctggcgtagcctgtctgcactgactctcaaactttattgaacaactcggctcaactgaacaagattagacagctttcgtcttttggcttgctgaagtggttgctaaatttataagagcaggcaggaatattgcttggaaagtgtccctttcactgtatacagagtgctttcaagcctcgtagctgtttgtattgtggagtgtgtatactgtcaggttttcatatgaatgcccgtcaaaagcaacttggtacaggaggtaaacttcatgaagtatttgtctgctggagttttccttttggagcggggaggtgtggttgggtaaaattagggtagcactgactattgtaaaagcaagtttcctgatggaagttttcacgtaaaaaaaattcctgcctgcatttaactttactaagggaatagtaattttaatttaattttttccatattaaaaatgtgcacttcggttacttcttgttataactttaatatttacttttgttgggtgaactctcattaagaaaatcattgagctaaaaggtaccctcatttccactcaccctccccactccgccgccccgattaccctcctgagtttattctctcaagaggttgggggaatggtgggaagagtctctggccagaccataacccattcattattcagttatttgtgaggttggattcaaatgctcatcataaacatgtagtttttaagacagggtttattatagggatgccgttttaagagaagaaaagttaatttattctaggacaattaagtcaaggaaatcctgttttaaacctggaacaggttagccgagtttggttattcatctttcccagagaatgctaattatgtgtcagagcccccctgaggaagggttttctggcctccaaatgaaggtccctttctacagaatttgcacctcagtgctagaagttcatttcagatttaagtttgaaataaaggctttatacagagcacaaattagtggaaaatatgacttgggccatttgtaggttatgggaatttttataaaactgacataagttttagtgtttttgacacccttttgcttttacgtaactgcaaaattcttattctatagactgtgaattttctgctaatgaagtacaagggtgacctactgcctaaaaatattagttagaggggaaaataaaaatgtattttgtcttttgtagtttgttttaaaattgcaaggagcatggtatgaattgctttcatagagatcaatgtgaacatgtgagattacaggattttttttgtttttgtttttacttgatagattaaacatataatttaccccttaattataaagtttgggatgaggatctgcacaaaacattattaaaataatatttcacagttaccttgtagtagtcagcaaattctctgtaaagaccaaaatatacctcattgtcttttctgttctgcaagtcatttgctaaggtaaggaatatattgcttagttttcaagtcctacacacaggcagaaagactaaacttgctgctggctttaggtagttcaagtcctgagtcaacataaatagtatttgttattttcggtttgtatttttatgcaagtctgtgtttacagttctactttcttctgaatttgaacaaagttatgaaactgctaaagcattattcttatgtttattgggggagcccttagttaatcatatctgctttatggattattttgaagataaatttgtatatgagaataagatgtgctcaagatctatttatctaaaatgcacaacaatattattatttatacccaaatacagtttttttttaagataggaataggaaacggtttttacattagatgtctaagtggtacctggacagcagctttctttccatcagcacttatctgccagagcacagtctgttgattaaatgtggaacttgtttaggagcatgtagtttagagttcatgtatgattcaaagagatgaattggtccacttgttgtgggttcacataggcagtgtgatttaattttatgcatgggttctttgatctgctattatagaaaggtcatccaatcacatttgcagagaaccatagtggagaaatggaaagttcttactgatcgaagggaactgaagtattaggaaactggaatacccgctgtatatggaatttcttcaagctgtttcttacatgtttgaagaaatgtatggacccatcagagcatggacacatatcaacatcccccacaccttccttcctcaccctcagagccatctcacacctggactttcagtctcactctgtgttcctcttaggtctcagctttgttgtatggacagaagcaggaagtatctcacgagaggctctgtaggttttcatgattggcacctttatcccttttcaccaatgagttttctgttccatttttggctctgtcaaatctcttgctgggttacaaatctgacttaaaacaacaaaacagcataaacttttggatagcttcctaataggtcattctctaggagcaaaggccctacatcccctggagcaaccagagcctcagtgggtagctggaaggactttgtgtcaccccggaggccccgcgtccccaggcaggcaaagggaagctggacatgcacagtcttagattggcaaaggtttcagttccacgtgggacctgcaagatgttggccagcccatgagcagaaacctcatgggcagacccatctagaagctggtgatgccaatttgccgacccctacatctcagtttaataggctcatttcctgctctccttcatccttccctgtgtatttgtgtactttggaccctcattcataaacaattttgtctgcaaagatcccatcccagccctgtagctctcaaagttgctgtgaatgagaaagatacttcttttccgggagagggatatcgagaatgagacctaattgatcatggttttttaattgctccttaaagtagtttacagagtctttcatttttcttctttctttagaggatgaaagtcctggacagacttatcacagagagagaagaaacgcaatcactatgcagccacagaatgtccaggggctcagcaaagtcagtgaggaaccttcaacatcgagtgacgagagggcctcattgatcaagaaagagatccatgggtccctgccacacgtggcggagccctctgtgccgtaccgcgggacggtgtttgccatggaccccaggaatggttacatggagccccactaccgtaagtgcccatgccagtcggcacttgttcaggagctatggggagggctgtgtgtgtgtgtgtgtgtgtgtgtgtgtgtgtgtgtgtgtgcgcgctttatgaagttttggcttgtataatttattaaaaggtgtaattttctttccactttccttcttactttccctacttctttcccattctttttagagagagatgttttcttacgtctctaagcaacatcagtcttcagtggggcggccttcaggagagtggtccatttgtgactaatccacatgagacttttgttgagaagtagaactagagttactccatccaaacagatgctgcaggagaaaaatttgttgttatgaagttatgaaagcaggctgcattaagagaagtgctcaacagccgcaattcccatttttaatgattttttaatgtaatgattttgcctattcccatttttgatggtttgtaaaaacaaacctcttttaacaaatctgtgctaaattccttaaaatggaagattttcctttgtgctgtattttcctctctaaccagcgtgccagacacatcagaagctcctttctcagcactaatcacgtttaagaaattaactaggactctgaactcatgtatgggatggttttctccaacggcagaatataaagaaaaatgtataagggttgagtttatttctgacctgtttctagttaaaaaaatacaatttggttgtggagtaatgaagttcatattgaggtgccaaagcttgcagctcttgattacagatttatcaccttgccaggattcagacttgccatttaaccttcccggctccaattccagatgatccattgagctccagtgagggggactggtttgtgtttccccttttccacatcattcagaaattttagtgttttaaggcaaaaggtcattagccagatgactgattagtgaggacagctgattagtgcatgtttttttgctcaagaaagtgcccaggataaaagctaatttcatcccttcattagttggcttgcagcaaaggggaatgctcactcctcagatcaaagggcctcgcataaccttaagtctcagcaaccgctaccccgcaccacctcccccccaaccagattatattgttggaaaagatggaagctacattattttttttaagtggagagagcattttttaaaaagtggtcagaagcacggagggtagttttctggattcttctaagcttttgaaaaaggttacaacttctctgtttcaaaagtgcttgtccatcttatttctgcagatacagaaataaggaggaaggctattgggcttgttccttccttcattcagggtttacttagttttattttattcatctttccttttagtaatgaaggtttaaaatagccttggtaggctttttctctgagcacattcctaagttttctgcattgtatttttatttgtgagtctcttttaaacatcatccatgcagaaaatgtgagggactcctacatgctttctacctgtatttatagaccccagtagtagacttactttttaagaaaaattcaggctagactcttagccaaagctccctgcattgtttttgttcttatgtgtgaacacaaacttttcccatctcatatttatgttttgttgtcttttcaagatgcccactaattagtgaggtatttaattagtcaggacagctgaagagtacttcttttttggctgacagtagtgagcagataaccgttaactttctctctgtgccattcaacttgcagcttgttcttggttcgtttgttttaacggtttcccccattgaatcttcccgtcctctgaggggctgggagctctctacacctgggacccttgtcttccttcagcggtgcaagtgggacccatctcctggacctccaatgtcctattaactaatgatgggcacgggagagctcttagggggatctgaattcattcatcatcactctgttttgaggttacagcattcatagtggattattcgttacattctcccacaatattgtccaaatcagtgttaaaattatgtgataacttataaactgtataagttctctgtaaccaaatggcaaatacaattttgacctaccatcccaatgtactccctaaattggtcataaattacattattatatagataatatggatgggaagtcctaaagactgcacagattggctcaacacttgggaatttgggttcaaggtccagctttgtcacttgctagctgtgtgaccttgacaagtgtgctgatccctctaggaatcctttcctcactgtgggatagggtgataatatgactgcctgctccatggtgttcttgtggaaattgagacaatgcaaataaagtattaactaaaatctctggcacatgttaagtgcctcaaatgtattaaggtagttcttctctgctttctcttcctccttctcctcctctttttttccttctcttctacatcatcatcctcctcctcctcatcatcatcaatatgtgataagttgactctctaagtcatgtttgtgagggttgcacttgtatttgattcagtgtagactgttttttttttttttctttctttcttgccagacctggtcacctgcttgcctgagaccagtttcttctataacacagattaagaattgagcaaactgcaaacctgtaactgtggtgtcgttagagctgtgcactgtggccttctgaacataatcttttctcagtcaacctcagtagatcgactataacttttttctgttttgtaagtgaagaaattgtaaagattttaaatgagtttgagaagtgttaacattttaaattcttagcagaaagtgttttatgtaacaaatgcaaactttaatacatgcaggaacataaaagatatagtattatttattcatattgaatatttaaagacatcctaaactaagcctcagcatcatatgggatatgactttactttttctttagaactctgttggattacttaatctcctgccagtatcacaagtattttttgagatactttataataaaatctatctgctcacatggatttaattatccaggcaaagctaatgattgatgtgaattgaaggtgataaattttccatgaattttttagtgtatgaagaaatgccctctttttaaaatgagacatacagttttggtcacatttgtttatcttgtgggcatagcttgtctcagtcgtgggccctgtcaacaatacaagcgcattgcagaccttcagtagctcaagttcagaaacatctttttaggccagtccccttgcccttgagttatttgctagctctgctgagccggtcaaaagaaaagactcctctaatccagtgggctggccatgtgaacactcacagcaattccttcatttctctgtggttggaaattgtagactctccaagatgcctaatttgtgtttctatatatatgaactttgtatttctaaagtgtgggcaggcttcctgtaagaccggaaaagggaaaaccatttttgtttttttttccccttcagaaggacatctgtaaaatttttattgcacaagattttattatatttgggtatgcaatgttgcatcttcagaaattgtagttaggcaaaaatcaaagtattttaggttttgtggcttaaaaaaaaaagaaaaaagaaaactcagggacagcgggcacttcaaacattcacagcatatgtttagaataaaatctcccggggggatacgggggtattctctcatgaagggtcgcagtggacgggctgtatatcaaggcgcaaaagtagacgttttagatgcatgactcagacatggcgtggtgttgacaggctttcagctacaggatcactggcgctttataatttgggggagcgtggtaggggttagattggaggacctgatcttgtatcagagtcagggtaagaagccccatcctctgcccaaagattcctcagcaattttcttctgcccatgctctgtctgtagccaggtatttctaaccgccatctctccctgctttcattgactgccatgcatttatcttctataaactttcaaaggcaggtgacataatagttaaagcattcctgtaccctggccgacacttaacttttattcgcttcccttttacagaaaacatgtgttgcattgtcttctgtcttactgtcaagagtctagtttttaaactcttcctgcagggatctttgtgcaaagtttctcggattcactagtcatgtcatattatagggtctctgctggctttggtaaagggagcagaaagatgcctgctttttaaaaaatttcaggtctcctttacagttttatagttgtgtgaaggctgcttttcttctgcccccaactgctcctaagcagtagttcttcatggaaaatatgattcattcttccatgcaaatgctttgattgaaaacataccactggtattcttcctatgttccccagctcagatgacagaactattggttgctaattagcaaaacctgaggaattagcttaaagaaaaaaccctgaatttttaattggcttgcatttattttctgtggaaggctgttgtgctaagcccacttgcattcttgtgtgctaaaaaactgcatagattttttttctacctgtctgtctttatattaggtgactttccacatccctttagaaatacatcttctgagtgaatggaagagaggatgtatattttacatatttaataggtacacttgctcatacttctctctcttactatccaagtgtcatcttgagactgtgagagacaaaaatgcctaagaggcataaatgaacagttttgtcttgaccaaactgcaaaggcagtgacagttccctgagctcttagttctcttctcatccagactgtcttttacatctttggagaacagttgatgagccaatcagaaatgctttgtttttttccgccctttgaaaattagattgtttaaccagaaagactgatgttgggtcacaccctgggggctttgctaggtctcttgcttcctaggctgttagtcttgaattgcagtaagagctggagtgaggagatccaaacaagtccataaacctttgcaaaactattatttgtgagcttgagaatagctccctgcttattcttgtctttctcttagaaattcaatagaatgacctggctttcttttagtaatccagaggtaatgttttaagactagaaacagtgagccacttacatagccttttttttttttttttttttttggagacagagtcttgctctcgcccaggctgtgcagtggcgcaatctcggctcactgcaagctccgcctcccgggttcatgtcattctcctgcctcagcctcccgagtagctgggactacaggcacctgccaccacacccggctaattttttttttttttgtattttttagtagagacggggtttcaccatgttagccaggatccatagacttttaaagagctgcattgcaagacaacttggagcaaagcaatacagatttagggataattcttagtgttccagatttgaactgttgccagtgaatcttgactactcttgtgcctgatgcgaccgtgagtctgcgtatctctgttttaggagatagtgaatgaaactgggaaccaacagtgagaaaagtccctgtagcatttagaaaaatttgttaacaattttattcatcaattttgaggataaatttattaaaggagactgggagaagcttgaagaccacccaggtcaggaagagaaagaaaagaccaagagagaccgcatttttctagagaaaatcacttagccccttagtgcactggtccagtcctctcttcccctgccgcctggcactgttctcttctacaacgactcagctcccattggccactgctctggtgctggccctgcccttgttgccctgcttgtatagttgtttctcctggaccagttacttgctttctctttgccttcaaatcctgcttttgtttaaaggcctatctaacaacccacctccttggaaagtctctaagagccatcttacaaggatattttcctaccgtggacacttgagtagtcatgtcattctcacctttaaacacatcacagctacttccttgtgttgcccctacctggtggcccgacctcctttggaataatgtgattagtccgaggcagtacttactttctgtgggcaccaaaactcctagggtaggactggggactcatgcgtgccaccatagggcagagaagttgggagctgctcagatgcttatcacagtcaccatggaggtggaattccaggtgacccatgctcacagcctgcccatcagagtggcttcttgaccacctgaagagacattgctgtttctgcttcccttctacaatttagttattgtacacaacctctgatccaaacttagtcacctaatccttcctgagagcaggcaatgtacaaagtatttatggtacatttgtacatttgtaaaatctgcatttttttattttttatttttgaggcggagtcttgctttgtcacccaggctggagtgcagtggtgcgatcttggctcaccgcaacctccgcctcccaggttcaacccattctcctgcctctacctcccaagcagctgggattacagacatgtgccacctcgcctggctaatttttatatttttagtagacacggggtttcgccatgttggccacgctggtcttgaactcctgacctcaggtgatccgtccgcctaagcctcccaaagtgctaggattacaggcttgagccacctcactggcataaggcagggacttcgattctttggaataagctggcatttcactcatagacttggatggggaccgtaattttaagtactgtaagattaacacaggagagctgcctctcttccatgacacccatctggcatcgaacaagtaggtattttccctgtggttaaggggagcatgatgtttgtttgcctttttccaaatttcagtgatgtatcttgtcttcaacagcctctaggcaattcatattttggtaacatcttcccaacttagcatccaagtatgcgtctgatccatgttgatgggaggccccatctgcaactcagttcaggatcatgaatccagttgcttaaagattccatgtaattatttatcttttctaatttggcacccacccaaatggcacttttttagtagttgcttgtgatttctttccctccgtcctttccctccctgtttccttccttccttccctcctagagtaaagcatgagaaacagcaactcttgccatttcatagccatctgctaacagctttccctcccgctttcttaatagaggcaacattatcctcggccctcctcctttttcttgtataattaaagaatgttacctttgatgtctcttgaagctgcaatctcccatcctgccttagctttcttgatctcatacctgtaaatttgtgctgtatcttcatagttcttagggaaagggcttgatttttctctgtgtgctgttcacagtttgggttaatttagagtaaccgatctggcattttattgctctcttctctctgtcttctgatatagtttggattcttgttgtacgctttgaaaaggatccaacttcctcaattctttaagctattaaatttgggtctatcctacaatggactgttctcatcattctaatgtcttcacttcttttgaggggggccaggcttttcattaacctcagtttttcaatgagtttcttcttcttagatcaaaataaagcaagattccatttgattcctttagctatttatttttgtgttcattctgtcagtcatgtattaattgagcatttgcttattgagtgtcacctaagtgctaaacagtgttgaacaaaatgagcaagtgcctgcttctgttgagctttaggccatcgaaaagtcaatacaagggagctgtcaggggagagagagtgaggagtcctttgggagcaggtgagggacttacccagccttggcagtccagaaggcctcccggaggaggtgatatctgaaagaggtgaggaaagagtaatctaggcaaaaaggagcatttgtcaaggcctggaagccaaaggaagaactgacatctgcaggacttgagaagaatctttgtggttggagggtgaatttcaggagggaagtggcaaagacagggctcaagaggtccaggccagcaggcttctgtgaggagctgtttgtttctctcctgcaagagtctggggtgattactaagacttgttccatggccctttgtatatttaaacagacctttgggttcccaatcacttacccagaatttctccattgcagaattgaattcacccctgctttcaatttgacagcgtgcgactccatcgcaggtcacagggttcccctcccaggcgtccctggctgggctgctgtctcattggtctttaaggatgtgctgctgcattcctttgtgtagcaggtcatatatatatttttttgagatggagtttcgctcttgttgcccaggctggagtgcaatggtgtgatctcggctcaccgcaacctccgcttcccgggttcaagtgattctcttgcctcagcctcctgagtagctgggattacaggcatgtgccaccatgccacgctaattttgtatttttagtagagatggagtttcaccatgttgtccaggctagtcttgaactcctaacctcaagtgatctgcccgtctcggcctcccaaagtgctgggattacaggcgtgagccaccatgcccagccagcaggtcatattttttcttcaagacaacacaatttatttttacttgttctcaactgctgagctgctctgtaataggtaaccccaatcaccacaatatcttgatcacaaagtacaaataaaaaacataggaaataactgtggcttcgttcctaaagaattaacagtgttctgtatcaaggcacattttaatttccacttacagtgttcaaaatgaaaaaaaaaagcattgagttttattttattggaaaactcccaaatgctctcacatcagtcaagctagagaaattgtgcagcagggccaggctgaggttggagatagggcccagaaataaccaagtgaaattcagctgggaaatttagtagctaacaccaccaggggagcatgagaacaaagactggcattagtggatgagcctgcaatccagccaggactgaaagagtctcaggggagaggatgggaccccggaggagacttgtgccatgctccctagggagccgcaggcctaatcagtggacattgtgaggatcaaagggagcccactctaggaagcggggtgtttacgtcgtccactggggggacccagatctgcatcctgattgtgctcctgtcttgtgagtggagtaaaaggaggtgcctgtttcctaggtaatttagacaagagcagagaagtgcacgtgggggatgctgagaagcaaatgccagctcttcttctggtttgctttcgtggaataagcctgttttcaaatggggcaagatttcacatttcctttcccttcccctacccctgtgtctcctctttgtaagaaatttattccctcctcccccaggggtgaagggaaactaacatacaatggtagctttcctgtgacctcgctccctgctagagaatctgtgatccactccaacttggtgtctgtgatcccagcttggctcagtgaacctgaccaagtgggttgaccttttgatcaaatgtgcagtttacctctcatatataggtctgtgagatgcatttttatgtagcctctatcttttatgatgaatgatgttttaaatgcagtatgtgtttatcacattgccacagatcgatgatgtgggagatagtgaacaattggagacacctgagtgcctctgggggactcagtccttctgataacactgctgacgtgacctgcctcgagtctcactccattaagtacatgatgcatgatatttattttcattaaaaaactttgtgcagtgttttgagagcctgctgtgagtcagacactattctaggtcctgaggggtcagcgtttgccaaaacaaatcaggttcttgttctcaaagctgacataccagccagaagagacatacaacaaacacctaggcagagccttaacaagaagatacaggttgagtaccccttatctgaaatgcttaggactagaagtgttttagatttcagattctgaatatttgcatatatagaatgagatatcttggagatgaaatccaagtctacacaaacaattcatttatgttttatgtataccttttccacacagtcttaaggcgattttatgtagtattttaaaacaattttatgcatgaaacaattttagctgcattttgactatgacccatcacatgaggtcggtcaggtgtggaatttttcacctgtggcatcatctcagctctcagagttttggattttggagcatttcagattttcagattagggatactcaacctatagctggtggtgctctgagggtaataaaccaggtgatgtgctagagagagacttgggtaggaatgttgtgccttaggtcaggtgggtggggcagggaaagccttgctcaggaggtgtctttgcagccagaataactgaataaaaaaagagaagctgccctgggagatctgagggagagcattctactgaaaggtttgccgtgaaaaagtaccaggagcggagagcatgccaatgtggtcattggccagggggtgggacagtagggggagatgagattgagggaccttgtgggccaacaaaaagccagtggaagaagtgttgtgatttgatttttattttagggctgtcactctggctggtgtgcagtgacgtttgtgaaggcatggaatgtggaatcagggaggtgacttagcaggctgctgttgcagtggcccaggtgggaaatgatccttgctgaaatgatagccagcagaaattaagctctctgtctgcaccacaatgttatgccatgggctttgctcttgaagtcactaaatccccacaaaacaaccttatgagcggttgtcatgattttcccctttgacatatgaggaaactgagacctggtaaagctaagtaagttgtccatttttacgtggtttggaagtggctgaactgaggtttgaacccggtttattggctccagaactcagattcttcacccatgtcccataacggatgagatttcaaaatgatagtccagatctgtgcaagagcgtggctaggttgccagtggtttgggatcagcccagctggggagtgcttggaaactatgtcctggaacccaggtggtggcattgccagttttgggcaggggcttggagtacaagggtgtagaatcagggaaggcaggccaaatgccacttcggtgtccaggctttgttcttatgcatcccagtgtcagagaggcaggaactggtccttgctacctctgccctccccgtgctccaggtgttgggttgtaggggagaatgagacatttcttcttattttgttaactgatattttgcaaagaacttaacattaccttacctagaagttaaaaatggggaagcctgtggtcctctctgtacccccatgttttggaggatgtaagagttggtacacagtagtaatcaccaccacaggccatatgtgtgatatttcccatgtgccaagcactgggctgaggacctcattatgtgatcttctttagttttcacacaaactcatttagcacttgaattataattatggagattatacagcctgctcatggtgctggtttgagtctggactccagacctcggctttgtaactgagaaacggaggcctacgtgcattccttttctagctgtcttataaaacgttgtccttctcatggtgctcctgttgcccccacatctgcttcgttaatggtgcagtggcttttggaagatgggctgtctctttggatcaaagatcttaattcattatgtgaaatctcagttctcaagaacagtttgtataataactggagctttcacatgtcaacagataatacaagccagtatctggccctacctaggcatttttggggaccagctctaccagccatacagagtccactgtaagatccttaactgtctctatatgtggttctacacagggctgcaaaccaccctgccccacccaggggaggaggtggtgggaagacagtatcccctttgtttataaatatacttaatgcttacatgtggcagggggagagaaagagaaaaaaagtgagagagagagacagagagaaaacagtttttttccacaaaggcatcttggtatccaacagtcccgctaatatggacagttcatgtctcctgactttggtgtctcagataaactaaaagaatcttaagcatgatgaagaggttggaggaatgatttatgagaaaagatcaaaaggactgagtatagatagcagggcccgtgcaggctaaagacagacatggaaattctcaaccaataacttaaagaaatatatgctaaggaaggccaagactgacacagagagctctgagtagaaaatctgtgaaaacagtaagaagaagaccactgggatcccttcctgtctctgggacctgcaagtaggactgatacttgctttaaagacaaatatgagatatctgcctggatctgtataaagtaatgtttcaggggacttgatttgacctgagatatatctggtctgtgagataaagatacatgttgtggcaatgctctcctgctacatcaggaaaataagaaaaggcaacattgagacttttaagagtgactataatactctgagatatagctagctagaatagtctaaagatcatgaaaaattgctacaaggcttttagagaagtcagagggatgaatttttagatttttttactggttccccaacattaattgagctccacacacagtagaataaaagacatgaccttagcgttctagattttataatttggggagagaaaataagaaacaacacatgaaacaattaagttgcatatcaacaagtgtaaaatagcaagataaaaggcaggacctagatctggtgacggtgatttcagattccaagggggtttttacaatagagctttgactccatggcaaatttaaatccactatgaaattctcctaattaacatttcccttcttccttccaaatatcaaatttatggactctgagaaattcacataacacatatgccgatgctgcgttttctttctgcttgatccgttccagcttttattaagtttaatgcctgactttcattaatttatgaggagttgtgaactgcaatctgaaatgctcccctgaattttagagttttcttgcagggaaaatttcacgtgagctcatcctgacccttgctaatatttcagccaagcacatagtttattgtctaatgacctttcaaggcccttcagtgatgttggcacgtgctgtcatattctgagggtggtgcgcagctagtctttgtcagtgttgatttcattctgcctcatacctgatttatcaaacctgagagcccacagcatgcctaatttagcacatagttcctgtccccaaaatctaataaactcagaagtaataaattttctgggtttttgtgggtttgccctctgagctagggtagttaaaagttgcatttggcatgttttgtttaccatagcggctacggaaagtgcccttttcctttcttctgtgtcttctcatgggtttatagtaacagggaactgattctaggacatgaatcgttcagcttttggtcgttaacgctagatgtttctcatacacgagtccttctcatgcatagttatttgaagttaatatttcgcattggtgaccatgtattcttatgtctgggagcgcagacatcagactgctggactgtgtgtgaaatagcctacttgagatgtcatccctggggactacctaccccactgccaggacaaaagacttttgagacccaccttagagttcctttttggaaatgtatgccaataggatttttttttctttttttttttttttgagacagagtctcgctctgttgcccaggctggagtgcagtggcacaatctcggctcactgcaacctccacctcccaagttcaaccaattcttttgcctcagcctcccaagtagatgggattatgggcacgcgacaccacgccggctaatttttgtatttatagtagatacggtgtttcaccatattgctcaggctagtctcgaactcctgacctcaggtgatctgcctgcctgggcctcccaaagtgctaggattataggcaggagccaccacgcccagctaggatgttcttaatttttttttccttttggtaatggtgcagtcttgttcctttgatgccacactcctgctattaatcttcagattttctgaagtgtttctctcataatgagccaccaggtgagcaagactctaaggcacagttttttttttttttttctgctgctttctatccagagtattaagattctaattagaaactctattatgcagagcttgataggaaagctgtgattggccccactcctgaaaagagtcaggattcagtggggtgatgatgtagtgtcagccctcctgttctgtgaatttcctgatcccagtgtttggagggaactcggtgcaattaggagtgaggcctggagtctgactggttgagaagctccacaggctgcattgtctgggttttggaagtaaatgaacttggaggcatcggcaacactaatgcttgagtgtgttctgtcgtttacttgtcctcatttagctaatgatatctgagaccaaggtaaaatactgatttatttcagagttccttgtttcatttgaatgccaacctagttttgccaagagccaaagtagaaacagagttgttctaaggagtcataagtttgttttcttttcacttaagtaagctgatgatatgagagaatgtttttgtataagttttacttttattaaacaaattccattcttcaaagttaatttctaaaaaaaagtatttcttttaggaattaatattgaaggccttttggtgttctgaaattgtaggagagggttttggtgcagaggattatggtgttagtaacaatggaatatggtgatgtgcaaagatttgaagcaaatgattattgatagggtggtaggtgaagattacttgtgtttttttttttgagctcattttatgtttaaataccttttagggtcttttttccagtctcagtttaatgtttcctaagatgatgctctgctaaatgctttacaaaatcaacctgctcatgttggctcatttctgatcagtggtgtcagatttggttgaacaattggggctaattttctgaggatcccagaattgaatgacaattgtgaggctgtaagcctgtaatccactgagaggttataaagagatgttactagaattcttcctcagagtaatattccaaaattgggatgccaagccaggtagaagcaaagttttctccttgaaatggatttgaaaaagccaaactttttttttctatatgcgatgactatttgattattccaatattagtttgttgtttttctaggaaagatccagcaagaaagaaaccttgaagctctctttataatttaacattttttaccatatttgatgacaattatcatgtacaagttaacacatgctcattttaataaatcatgaagccggccgggcgcggtggctcacgcctgtaatcccagcactttgggaggtcaaggcgggcggatcaggaggtcaggagatccagaccatcctggctaacatggtgaaaccccatctctactaaaaatacaaaaaattagccgggcgtagtggcgggcgcctgtagtcccagctactcgggaggctgaggcaggagaatggcgtgaacccaggaggcggagcttgcagtgagccgagattgaaccactgcactccagcctgggcgacagagcgagcctccatctcaaaaataaataaataaatgaataaataaataaataaataaataatgaagtcctgaagaccctggaatggaaagccacagtggtccatccttccttctccaaccctagtcccaggggcacttgtcactgtttttgttttagttcttttggtaaacaatcattacaactccagaatgtgcttatatttttatatcctgacatgtcaactctagatatttcttatgcaatatattgactttgaaatgagaaagttaatctttaatttttaatactctgccctcttctttcaatattgatattatattattacttgtatattgggtgcttttataactttaaagagtgttgtaagcttctctttcttttcctcatcagcttttcatagcaaaacgagtaagatgttaggtcccctgtgccatccacatctcatcttctggagccagcttttctattatagtgtcagggttgttaatatgtttgtggggtcttactatcataaccacatctgctatgtttttgtccatagattgatttttaaagttgaagatctagaaagcatctacagcattatggttgtggaaattctctgtgttgaaccagtagaatgttaagatcatacctaaccttctgtgttagtccagtttctaaattcttaaatcacccaatggcgatgtgtctagcattacgaacaagtgctttatctacacttactctttaattgctttcctacctatcatgttgctttttggtagttgatttagttttttccctattatttgtctttacaatagtcttacatccccccactccccaacctcccaaccatatcttttgcacttaagggaaagctcccttctttcctggccaattcattctcctgagaagtctgaacgaggaatctctagacatccctttgtgatcttctggattggaaccactgtttcctaggtcttacgacttcaactttgccattcctaatttattcctttattttattggaatacatcaagtaacttcccaacaacagtggaggcagaatttctgagtctttgtgtctgtgaaattctctttattctgcccttgctctttcctgatggtgtagttagaattctaacttaaaaggcttccctacaagatcttttaaggcatcactacattttctattaccatccaaagttgtagatgagaagtctgatgtctctttgatttgtattcctttgtagatggcttatttttttccttcctggaaacttttgggatctttttatccttagtggtttgaaagtatgtacctagatgtgttttaatttaatttttattttcattaattctgcccatcccttcatggaccatttgaatctgaagattcattcgttaactctatggatgatttctattctatctttaataattttatctgctgtgttttctcttttctttcttcccaaaattctacatagttgactgttagacctcctaggttacttctgtgtgtctcttctcttttctctgatatcctgtatgtctttgcttttggttctgtgctctgggaaatttccttgacttcatttttcattgctccacattatttttaactttttgcagtcataatcttaatttctaagaactttaagaaatcttttattgaaacttcttcttaacatcttgctcttgccttttgtatgtaatgctttctaaaaccttctaaaagtttcttccaaggttagtttttcttgttgatattggtcattctcattcctgtccttttttctcctcataaaacctagtgatccttgggtgtcattccccaaaaccgtggagaaggatagctggcctaatgttgttctgcttggcatatggaaacttggatggatggatggaacatcctgaccacgtgtatcagttggcaggatttcctttagggaaatagggtggagcttctccacatgccagaacgaagagggcttgattctggggagctataagaaccggtatggcttgggtaccaataagggtgtcacaccaacttgctgggaccaacactagaagttagagctggtgtgactcttgtggtgagtgcatttgtgtgatagacctgggtggaaacagggcttcaaaatccacgctgaagccttcactttcccaggaaagttcattctgttttttgaaaaagagtcataaaatttttatctggagaaatgccagctacctgtgctcatgtgctgtgggcaggagacaggccatctgactgtcacgggtgtgtccggtaaaagatctgcccagcccagggcttttttcttttttgttttttagatggagtctcgctctgtcgcccaggctggagtgcagtggcgcgatctcggctcaatgcaagctccgcctcccgggttcaagcagttctctgcctcagcctccctagtggctgagattacaggcgcccgccacctcacccagctaatttttttgtatttttggtagagacggggtttcaccatcttggccaggctggtcttgtactcctgacctcgtgatccccccgcctcggcctcccaaagtgctgggattacaggcgtgagccaccgcgcccaacccagcccatggcttcttaggtgaatcagctgccacctgtttctttgccctcttgaagaatatttcaggctgctgcttctctacgcaccatgtccacctataattccagtcttacccactatgcatcttgcagaaatgggttgaaattttttatcttaattttatgtatttctttgactgcgttaagagtttcagccatagacccagactgcctcagttcaaatcctaattctgccactcctaacaatgtgattatgggcaaattacttagcctttctgagcccccattttctcatctatacagtggggccgggagtagctctgacatcatgggttcgttttgaggattgaattacttaatataaataaagctcttagaagtgcctagcacagagtaagggcctggtaaattttattctttggtactgttattttatcattactacaaaacttacttccagtttttcatttcacagaagtctttggagggacaggtgagaaatatgtttgcccagcctgctatcttgaactggaaatgatggattaaatatgttgcatttctgctagactgcgatagtgtcagttaaacttaagacccaggcccacctctgccaccttctggcagtgtgaccttgagcaagttcttagatactggactggcttcctcatctctaaaatgggagtggaaatggcagccgcacagggtgataacaggaattaagggagataatttgttaagacccatggacttccattcctaccatcacctctctgatgtcttggttctcaccctaaaaaaaaaatactgacataccaaggacggctcatgggctgtctgactgacagtttttccctctgcacatttaagatctcttctgatgctgctgaatccttctttataactttcttacttttagtttttaagatgtattttattctccttatgattttacaaatttgagaagcctgaaaataaatgaatttaattctaaacttctacctaaaaactaggcatgtatcatattttatagaattacttacaaagattaaagaggcagctttccaaagacagtgatccaaaagccaaaaagtcttttgaaaatcttacttcttgctactggaagagctagtctttcatttcctgagaaaaatgtcactttttatttttttttaaccaaatggattaaaaacagtaacaaccatatccaactggtagtattcaatagaaatacatgataggttgatagaaatttaaatcaaataattgaattctggctaataccataacagacaattaaagtgggtgatgctgtcaaactgtgtcttaaattgagtgctcccttattacagactggctactcaggtaagtttttctccaaacatcttcctatatatgtatattttctttgattttatttttttattgcatattaagtctatttgaagatacttgattggcaccctgttttaaatttgtttccttccttttttctttttcttttttttttttttgagtcagggtcttgctctgtcgcccaggctggagtgtggtggctcgatcatggctcactgcaacttccgcctcctgcctcctgggttcaagcaatcctcctgcctcagcctcctgagtagctgggaccacaggcatgtgccaccacacctggctaataattttgtattttttttatagagatagagttttgccatgttgcccaggctggtctctaacccctgagctcaagcaatctgctgccttggcctcccaaagtgctgggattacaggcgacagccactgcaccaggccctacatttgtttcttaacatggttcattttaatgcctactgcattgtttaaaaatcatgaacttggagaaataaaaatacgctgtaaaacttaggttgctttaaaattggaaaagttattttcagtctgtcccaaacactactggagtttaaatattttaagttggcactgtattgaaataggctattccctcatagaaactggccctgtctaagaaatgggcatagtgaatcatggggatgcatgtgtgctgtttaaaggcaccacagtctgcaaacagttttgcaagtcagatctcattgagaagagggaagtgggtagatttatgagcttcaaatacatgctgcccacctcacatgaagtacatgtcagtgtgtttctttttcaaatcatgcatctctgaaaaatgtgtaatgggctgtggtgtcagagaaaaacatctttatcccagcttggatagaagagcatgaggcagtttgtctactgcaagcctgggatcagctctgaggtccgcttactgctgggcctctctggccgaagttaaaaaggcttgttaccagaaggagtgcctgcaatcaagagccatgtcagaagtgggaagataggctgtcattcagagaacaagactgtgtggttgaaagctggtgaaaaactgaaagctaaaaaaatccaaactgaaagagctggaatagccccagagttgaggaggccatatcgagtgtgggagtgtaaagtgtagatggttcaggggctggctgtggactgacgctcgtcattgggtttttctctggggttctcactcttttgggctggagacagccctgtaatccagaaacaggaaggccacagcttcccagccctttaggctgaccctcttctaataagtgggttttggaacccagaccaaagcccagagtagaagaatgttgtcatggtagctatagaattgctggtctatgtcaagtgaggtgtatacttttctgaaaattttaaatactgtgcagataaaacacaagaccatgatataagatagtgtggttatgtgacttcttgcaggatatatcatatggctgattttggtttcctttactcattgcttaccaggaaactcagattgttgtttccaggaaactcagattattagctgctcagttattccaactctattggattgcggcctgcatattctctcttaactttctctaggtcttgatcatctaaactgttctctgatcagatttttctttagttagcattttctaccttgtgaattcttgtatgctggctgaaatctttaatgaaatgaggcaaagtattaaaatcataccactctagatcacttgctgaggcatgttacaatttcactcagtatgagaaatagtcatataggtgagcgttgttaaagcaatgtgtgcagacagacttgtgtgacagaataagtggatgttgagaagtcttgtgttgaatgaatttgatcacagcagttttccttctcctcaaatgtcagaacttttcagagaaacacaggcactaccctttctcctggtatgatttggaaaagtcagtacctctagcctcttagaaaggtctcagagggaactgttttaccattcaggtttcaaacttttctcacctgcagtatatgtgtgttttaaatatttttctctctcatttttttaaaaaaattccttttaagttgaaccaggtttaaggatatttgtgtgctgctgttttttcaagccccaatgtgcagtgattttgtaagtaagttttaatatttcagtatttatatttgtattcctcctgtgaaaatatgtgattttattaatcgagttctgtatgatcattccttgtgtttttgagttatctcagacatgcagctttcctatcttggcgcccagctccatcgaaccccattgtacagagtttgcacgtaaatgccgtctatagttataccctcaaaaataagaggcttgtctcctgaggacagctctgtattatgggcagagtataatcctgaacattgtttttctttgctctcaaatggctggggacagtgagtcaggagtgagaactccctttgtttcatgtcgtgtgcatggcaggggaagaatgtcgcagggcagaaaatgaagaaagacataaaaggatctcagctcaaggaggtcagatccatcagaggcttagcgttgccttcaaagatgcctgggacaggtggcagttcaagacaatcacagtagtggtgtccgctggagccgagataagggattgccgtggaagcctgctatctgctgcccgtttgctttgatgtaactctgctagcaagacttgggggagcagatgactgccttcctccgtggtctgctgctgttgttcagccttttaaggtctcattacagtgctccttgaggattaatcctctttaaggtttacatgagatggttttgtccaagggcccagacagggaccttggcgccacctgtacaaggcaccatggcaggcttttctttccccttacctctccaagttgttggtacttacaaatacttgttagcgtgaggactgtaagcatgcagcaccctttgctgactcttgttgtgtttttgctattgtgcgagcaataccgttagcactaaattgtcagcttccacttcctcactctattctctgtcaactgtgtcccttttttgaaagaaaatctgctgtagcttggctgtagaagggattgttgagttcttttgacccattgtctttatgaaatatctatctgcataacttgcatctacctggaacacttcatcttaaaaatacattctttgagcgagcaaatcaaaccgctagattttattagacttgctattttaaataccatcatttaggaaaagaaaagtggcagattttatttctgacttttttcacacacacagcagcaccaatggcaacaactaaagcaaaaactatctcttgagtctcagaaataaactttgtcccgacactttgaatttttagttgaacaaagcatttcactgtcatttaaaatctctcaagtggcacttgaaggcaagcaagtcgggaactttgagaccagcatttgaatttggttccatgatactgtacttggctttccatacttggttggggacagagatgattctgagaattactaatagtacacggacgcttttcatcccttggtcagtggttcagggtaactttctgttgtcagcaactaaaaggtaattcacatccaactgactgcatttgctcagcttctccggtgttggtttggttctgtaggaagaggagcacttagaattaaaacgagtaccataactggtacacagtcccacaataagtgtcgtccacattttctgcaggtcagactctttacaaatttgaaataatctttaaaataacagcagaaacaagctaagctcctgtagtcagtttagtcagggaaaaagatatagtcatataggccacctgacattctacagataagcatgtgtttggcttctaaacttctgcaaaggattgttttgtggtgtgtttacattgattgacagttatcaaaaggaaaatcaccttttgagatggtctattttaagggtaactcctctccacccatgagtgagtaaataatggaaggcaagacaagacagtggggagaggcagctgcggtgggagagtcgaacaaagcagaatgatgactcggtgggcatcaggggccttgcctctgaaggtgactctttaaactgtagtaacagaaccaaccttgcgaatcttggtgtgaccatgtagcatcttggcttcgtgccagactcctgaatcagaattcctgagaactggatcttagattctgtgtttttaacaagtttttaaacaatgaagtgtgagaaccactgcttttaaaggtcagatgtcaatctcaatttcttcaagttcccagttggtaagcacttacattttccgtcttaaaaagatcctgtacatttgcacagctagttgtggcacatcagaccattctttgaattacactttacttttggtaattacttaaaaataaaattgaatatttatgatgacatcaatttagtactttccccaataagtaaagatggaataccagttattttatgctatggagaatttttatttatttctcaagtgttgtgcctaaactgaattaacaacaagaagtaaggataatttgtataattacgtttttgtatctctgaatttccttttaggaaatagaaatatatacacccttgtatgcattttaatgcgtatgtattttggtgtgtactgtcaacaaaaatatagactttactaaatatgaaactgctctcatttgctagaaaaaccaccaagtttgtgaattagttttctatcattactctttggtcaagacactgcatgtcttttaaaggaaggtcttattgctgagattagcagattcaggatgtagaaatgttggttgagtgtaattctctctccagaaatgtgaaaatagagttactaattactggtgaaaaaagtgttggcctggtctgtccaattgtcccatcaaagtggaagatgttaatttaagggatgagtaacacatacttcagacatacgcatttgaaataaatgtcgataatggacttgccaattgattttaccgatatgaatgctaatattttgttagcacttgtgataaccataagaaaacagtagaggtgtagaatataataaaaagtttgaagtagtacaagttttgtaattaatattcagatttatccttttggacattttgatcgtaaggtctaaaagacactcttgcgtgttctagtaaaaatattctgcattcaataacttttcaccctgttcaggctctaggaaaatctgattatcagaaagctaggtgtcttttctgattcagcatttggtacagaggggattactacagctggttttccttattcagttttacgagctgattatcttttagaatatacttgacttgcgcatgcttttaataaagaaaagataggtgctggtgacttggtttcttggaggaaaatcagatgtgattttggaattagaaaggacaggattctagtctcagccctttgctggctgacttgtgtaagtcacttaacccctcagcttccttcctgacaccaagtacctgcttcagatgattgtatgagggtcgagcatctggatccagacattgacatcctatatgcactttgtcatgagagcccataattggtatgaagctcttctctctcttaagtgattgaagtttgaatacctgaggcacagaacagtctagtttcctgttccaacaatatcacttctgggcaatttgtggttatacctacagacctcatggttcttctctaataaaaatcataaaaaatctgattttatgtgattaggaggtgagggttttataactggaaagactgtgtgaaagctaggactttttcaataaaatacatatatataaaatataaattatatataatatatgacatatattaatatatataagcatgctatctgatttcctggtctggcttatttttatcaaatagcatttttcattttaatattcctctagggtctctaattcatttgtcttcatgtcacagacattgggagataacttgtttgcatgttctctgatttaaagttacaggtgcggaagcctgggaggtaatggccctcaagccaaggggagaggggattggctgccatctctgttgccagtctcagaaaccttccacttgttgtggctacttggtaccttttaattttaagatctggggcttatttattaccaatgctgaacttaagataaccagagttgctgtgctgagggacagagaagcacacactagcttctgttactgctctctggttttattctgatttaaaacaatagcagctggtattcaatgggtgcctactgcttaggtgggtgcactcctgatggagggggaggaggtggggacatgaggatcctgcatttctaagaagagcagacatacaaactggaagctgtcactccccagtttggtgcacccatccagatccttaagggacatcagatggaaggaaaagtaggcaaagaccaatgtggaagagagggcaggggcttgggaattctacatggagataatgttgtcagccatatatttaagcaggttgcaattaacaattgttgactaaaataacatacattggtatttcgtttctgttatttgctattttgggggcaggggcagtaggtaccgcttaccttcactgcaccaaacttttgcctatttgctttctagaccagcatttatcaacatgcggtcccaggacacgcagcatctgcatccccagggaacttgttagaaatggcacttcttgtgcaccttctctgtcttactgaatcagaaactcttgggctgggacccagcaatctgtgttaacaagctctttaggcaaagctgatgcagcgaaagtttgagaccattgtgttaaggagtattacgtagaacaatttgggtctgtcattaagaggggaacactgaagcaggtggggaggtgtgatccaagtcgaagagggaaagagagtcatctgtctggtttcttctgaccttttgtcattggcaaattaaaacccaaagtagctgatggcacaggaatttagatgcaggagccagtgaacataatatctctttttggtggtggtttgtttaagtcattctcttattaagctgtaactttctgagcctgtcattttatatcccatgaacatgtgcctatttagcactcaggtttgcaggcggcaatccaagaataataacagaaattctatgggagaaaatgataattgttgatccccaaatactggattcatggaaacttatgaatgtagaaaaaaagttaagctttacaagattaaatcagaacagcatatctggagccatgttcatgcaccaattccaagttaagtaagaggcagtagccattcagagtatatgtctaatttcagcttcttccttatattctttgaaatactgttttgcccccttaatttaaagaaatgaaaagaaccaagcactttattcccctctacaagacatcaaggagagggggtaataaacagtacctcgccgatgcattttaataaatactggtttactgcatcccacaacggaaagcaaatacatgcaattacttgcaaatttcttcagtgtttgtacttataaatctctgcctaaaccttcccagctgggagttcagttagtctttctgctgtggaaccagggctttgttctcctgttcaacctcggcacaagctggaataattcagaaacgtattagagagattgctgctcccaaaaggcataaggaaataaccttcactcccggccttagagaaatcagcccaatcagagttcgggcagatttctcgattaaacaaagaactaactgtgcacaaattgcaccttaacaatttgtaaggtgtccaccttagaaatgtcttgcatatggaaagctgatattttttaatcagggcagtggggctgctaaagtcaaaatgtcgccagcattttcctaccactccacacaattatcatcccccgcaaattaaatttaaagttgcatccataagcagccctcagccttgagacccatggcaccgggttgtcaaatacagatggagacaactccctctataagtgcgagggtccagggcgtgtgtgcgtgtgtctgtgagtttgtgtggatgactcgattcatctggaacacatccccgggagttttgggctgtcaagttttatttcagcaaatttcacactgggaaccaaacagggggtagaaagttattgcacttaatgttgttgtgactttccttgcttctagtcaaattattcagaaatcaaagtcaggcccctgtgtcactgtggaatgttgtttagaatggaccttttaagagggatttagtagatttctgctgattgttaagagatgctcctgccaaaccgtcacccttgtggcatttttagaaaagtgactgtatttttctataggaaatctgggaatattttactttgtgtcagttctctatctgttctgtttgaggtacctttgctctttaatgcagggaagggacccagctgatataacaagcaggtactcccaagccttaatgcctagggtaagaacctcccaaaccccagcacttactttaagaagagagtgtacattacagctggtcttggtcacgtcattctggcctgaatttgacagtttcacattcttagtgtagcagaacaatcaagggtgctggcaaggatggtttgggatggttaagagcaaacagaaactatagcccctgggccccacagaaactctgagattccccacgtgattcaaaaaccggtcgaggaaaaacactgaaaattgctttcctcacatgttctttttggttttcttgttttgcttacatagaaatgtagacacaggacacattcattgacaagatccctttttctaatagaagtcggaatgaaagaatacagtgcgggagtcagaggcctcggcttcccttgttggtgtgctctgtcctgtccctccttcccttggctgagccttgtcacttgtaggtgagggaagctcctatcagccctgcctgcctcctacagccctggctgcctccaaggttgcaggaggcttatatggagagtggttgaaggagccttgctgaactgtgaaagggtcacccaaatggtgttcttcccttcatagttttgggtttcacgatgctgagtttgaaagagtttgaaagagttcgtttctctttcaaaacagtgatttgttgggttttgacccatagctatcccatgtacgttaggagctcttaaacagtggtgacagcctgtcattctatgcttactgtgtcaaatgagcaagttaagctggtgagaacttaaacttggaaatcagaaggccactgggccccctggctgcagcggaagtggtgtagtgtcaaggtgtcaagatgatcacgtcattctggcctgaatttgacagcttcacattcttagtgaagcagaacaatcaagggtgctggcaaggatggtttgggatgcttaagagcgaaaagaaactatggccccctgggccccacagaaactctgagattccccacgtgaatcaaaaaccaatctaagaaaaacactgaaaattgggggctaggggtctctagttgctgtgtgttagacttggtgtgattagaaggcccattttgagtcatggcactgccactttctagctcttcattttctctaaactttgtatccatcacctgaaaattgaggataagtatattgtcttttcagatctgctgtggagaattcagtgagaaaggaaataaaaactgcttagtccatagttaggactctgaactcaacgctgccatccgtggaaactatttgggacttaacatgcacattaagaaaataaaaaataatggaaaggtgaaaaagcccttgagtgtatttcattaagatgattaagctttaaaggggatgagaatatttgcaaacccgaagttggtattttgagcctccattaaaaagaaaaaaatccctgtatgaaaggcaaattcatcttatcttttcctgttaagtgtttgagagggccttctgacagctttggcccatcaagtatattctgataacttcacttgcagtgttagataatgaattttaccgtcagagtggacatttaattaactatggtgccgtccttccatggagacagcggcagctactcaagggccagcatctccctgaccacggaatctgcagtgatatgtagggtgggaaagcctcgagctgggttttctttcaaaatggcatttaaatgtacaccagatccacatttatcactttaatctaaactctactgtaaatgaacatgtatggcctctgagatcatacactttgctagaaggaggttcatgtgctggcagctcctgcctgaaacatcatttgttccattcccccagcaaaagcaggcatctaacaagtcaaaactattttcactaacgagtcctggcctcttttaaagctggagttctcaatgtcttctctcctgcacccatttcattgggtcagaatcgcacccatcagatgggaaagcttccccattaggaatgctcagtcattggtcatttttcttaaaactgagtcatggcaatgagtgtctaagtgacttgtcattctcaaaactgttcctaaaaggcgtctggtccttggtactgcaacatgtaaaacatgtaaaactacctgtcagacaggtgacagccttgtaaataaaggaccagaggcatataagggtgcacctaggtggtgcgaatgaaaacgttgctcaaagaggcatccaggaatccagagccctggcctttttgctggtatcatttccttctccttcccctaccactatcttttcttctctctcctccctcctgtccttctgaccaatctattgagtgaaatctcaacatcgcatattccttgacatagtaatttttgaaagccaacaccaaaagttagaattagtttaaagaactgggactcccacaaaatagggaattctgccataggttgagcgtttacctacaatttaaagtgtgcaccagcatgttgtagccttggccctgtccctggaggaaagacactgtttagttcacaagtgatatctgcgtatggctgaacattggtaaagggaggatgtagataactttgcagacttctgagaattgccgtaagtagctgagagggaaggaacttgaaaaggacaccctcggtcttatgagaccataataagaggtctcttatgagacctcttattaaattatggcgtgttaaaagtgatggagctttagctgtctgtgtttatggatcctattagtgttttgatacattttgtgttaatattcctgaaaacatacagtaagatgacctctgtaactgaggcaaacctaatttgatttggagaatgctttggccatctccggtaaccaatgctgtgccctcgtgcatcagaggtggtctgtctggcaatttttaagttgttcatataataaaaacaaatggatagattttacgaatgggttgaaaacagatccccacgtatttagaaaggggatggaaagctttaattcttttttttttttttttctttttgcagatctaaaacttggacctgatcctctgggtattaatgaagcttttcagtttatttagtttattcacccagtttcaaagggccaaaatttctgaggataagtgttgtttatgggttgagcatcctgcttctcccctctgtttcctgggtgaattttacccagcatccacatttcatcacataaattaaatcacatgagctcgtgtgctgctgttcaaaacgcagaggtttttaactcagcacttaaatagggagctgtacctgaaggcgggtcccataaaactgctcttctccacgtttgaatttgaatttttcatacatgtgacatgtttgggacctggtggcttctgtcaagataggtcttgcagaaatgtgtgtctcatgaaaagggtttgttggtgtttccactctgttgcttggaaagggtttctgtctggtcttggtgttgcccaggctgctctgtgagctgatgatgccctccctgttcatttgaggtactttcttcctcaggacttctgagggaaaacccaagacaacccacaacaatctctattttggtcttatttttaatatagccgtgggtagtatgacagttgttaacacttgccaccaaccccaaattatataatgtgctatgaaaataaaaatctctatgccaactccttcccactctcagaggggataagaaatcacggagagcataaaactgactctgcatacctgtgaccaccttaaaataacctcactctcaaaagaaattttgtttctctttcccaagcaactaactgccccactgtgtccctgctgtgtgcaagtttggccctttgggagacaaaaactcttagttgtagggaaataggtttaggacctcagtgttacagggcacttaatagcagcccgggggcctgacagagttaatgtaacatccacgtcacctgaactatcaggagtttggtagaaaagaagagatgaattatattggcttccattcagagattgaaaatctgtggtaatttgaagtttccgaaaatgtaggaaaatgggctgggcacggtgggtacacctgtaatctcagcactttgggaggccgaggtgggcaggtcacttaaggtcaggagttccagaccagcctggccaatatggtgaaaccctgtctctactaaaaatacaaaaactagctgggcatggtggcagggcgcctgtagtcccagctactcaggaggctgaggcaggagaatcgcttgaacctgggacatggaagttgcagtgagctgagatcacaccactgcactccaacctgggagacagagcgagactccgtctcaaaaaaaaaaaaaaaaaaaaaaagtaggaaaattatttggggccaacacaagaaaaaggtttacatttttgtctcctaccctttttttcccttttctctcttcttatttcttcactattgcaaatgctctgttatttttaaaattatgcctctcctggtcggtgcggtggctcaagcctgtaagctcaatattttgggaggctgaggcaggcacattgcctgaggtcaggagtttgagatcagcctggctaacatggtgaaaccccctctctactaaaaatacaaaaattagctgagtgtggtagtgcatgcctgtagtcccaactactcaggaggctgaggcaggagaatcgcttgaacctgggaggcggaggttgcagtgagccgagatcacaccactgcactccagcctgggtgacagggcaagactccatctcacaaaacaaacaaacaaacaaacaaaaaactctccccgacctgcacacacatacatacctacaccactagatttctggaagagttaatacaggtatatactggcaaggagccagttgaccttagggttcttggaacttcacagcacagtgcggatgtgtcacttagcagtgactgaaggacacatttctttttcctaagcctctttaccctaataaccaattcaatccttcacacacacctgctattgagaaagcacttctgtatttctttttttttttcccaagccaaaccgtacctagctttataaaagatatgttccataagcaatcatcgtatttcaggcaggacatgggtagacagtcgttaacagtatacaacaactttcaaactcccttcttctatggactaccaataatcagaaagccaagataaaacccaataagtcttcatctgatgctctgaacagggtaagtttagagtgagggttgacatttcgcatttagcatgttgtttaacaacttttcacaagctgaccctgactttcaggaagtggaatgaaaatggcagaatttatctgaagatccacaatctagaaacggaaccactgctcttttgaggggtgccatctcattgccatcactggaaagtccagattgtgtgacacactggtaaccaatgactggggatcatgtcccaacagatgtctggctttaagggagttaagcctatgctgaaaggtggaaagggagaagaggacataaaatcaaatttgtttttccctcccacaaggtttttgtgccaaggtggacatgtgtatcaaagtcagggagtcccccctcctcctgggagccaagaggaagtctctcagaactagaagggaaagggaaaggtgttttccccacatcagtccagcttcagagacattctattagggacatatatcctgtcctccaaaaacagcaatgaagtgttctgtgtgctaacaacatagcttaaagtaaaacaaaattctgcatttttataaaacttgataaaaaatagtatttcaaactgtacagtcatcagaagtacacagttatcaaaaatgcagacacttcacttggcatctccagcaccttcagctttctgggcctggtcttttttggcaactccattttctgtagggttattcccctccttgccagcatcagcttttccctttttccctttgggtaccttctcaggggcctttttaggcttgctctggctttggaggagcaggtttagcagacaactttgtggatcttctctgtggttcatccttcaccttggcttcatctccttcagcatccccctcagcctttctcttgggcatgctggcaacaacagcgacgggacgtaggtgctgggcacaggatgtggtggtgtgcgggctttggtcggtccgggggtcgttctcgcctcttcttcttcacactgctccgtacttctgtatttcttactcaccagagatgcagacatcatacgagcatccctggcattccctgggctttatttatttttgagacagagtctcgctctgtcgcccaggctggagtgcagtggtgtgatctcggctcactgcagcctccacctttcaggttcaagcagttctcctgcctcagcctcccgagtgagtagctgggattacaggctcctgccaccatgctcggctaatttttgtatttttagtagagacagggtttcaccatgttggccaggctggtctcgaactcctgacctcaagtgatccgcccacctcggcctcccaaagtgatgggattacagatgtgagccactacacccggccctatttatttatttatttttaactgaatgtctcctctctcttgggcaggctgggatgcatgatctcatgtgggcacagtctcctggtgcccagatatgcacctctacagtggggatggcagtggtaccttcttcatagggagaacacgtttctagcccatagattcttctgacattcagtaaatgtcaggcatccttatagttattagttgaaagaatgttggttgggattagaagtatattatatttaatttaaaaaattttaatgttaattgttatgggaaataatgggcatatatatttatgaagtacaagtgatgttttgatacaggcatgcaatatgtaataatcacatcagagtaattgaggtatccatctcaagtatttatcatttctttgtgttaggaacattctaattccacccttttcgttatttaaaatatataataagttattgttcactgtagtcaccctgttttgctatcaaatactagatcttattcattctatctagctgtgtttttgctcccataaccatagaactatattctgtggtcatataaccaaataaagctaagtaggtcactgaacagttgagcccaaatcttgttcctcatcaactgaagatacctggctggcttcctgcttataataacagtggacacagtcttctggggcccagatatgcacagtgagtcataatgcatttggagaaaaagcgttggtttccagaaagagtccatgatattatcatagacggcagatgaaactcctgtcatgcagtgaatagtggggtaaaatctcccctgtcattgtttgtgggagtcttcagcatctggcacacttttttgtccttcacaagctctgtgtctgtctttactggttccattttctattattcctcttcttgggctcctatttcctggatgtccagggctttacaccctggagctaagcactagggtggccactttctggatcttgctttaacattccccataccgggtgcactgctcacaatgggtcatctagtgtttttccagcttacccgcaatgctcatgatcacgttacagactgtgcaaacctaagccatcccacctggtttctgtgctccttttcctggactaaagagagcgagctgaggaaagagcagagctaggtgagctagctggtagaaaaggtgcttagcttcagggaagcttaagtgctctagaactttatttcttgttgctgtgtctcatgcacctgatattggctatttgaaacattttctaccttcctcaggcctgctctcctgcctttggcccatagaaaatgacacagtttcttgaagtatcacctccattctattcctggtgtcctgttcatgtctgggctgtggtaatggccttcagactttctgttctccagtctgtccttcatactgctgccttgttaatcttcttgaaatgcccccaagattaccttcctgctcagaccatagctactcactgacaacaccgtccagaccccttgatctgaccccttgagctaccttgcaacttggcacctatgagaacactctcacactgctgaacttgcctcacctgagcagatcttatgctgtagttcgctggtactcatatccgatcccagcactctgcatgcatgccttgccccttgttttcggcctcagtccagtctcactcttggcaggagactttctggcaaaacttagtgtggataagggttgatagactatgcaagttgttatttacttattatttatttcagccaaccctgtagtaagtccttaataatctttaatactgcttttcctactctggtagtaattatagaagaagattgaggcttacagaagatgaatagccttccagagtttgcatctctagtggtagagttgggattcaaacccaagtttgactggtttccaaagctcgtgctgttctggactcttgtcgttctcaaaccaccacaggctcatgtgccaccaaccagagctgggagccattttgcactgggtgtctactgtccttggggcagacaatcactgaataagttgatgttgcttttcaggaacccatttactaaaagaaacaaaatgtgtcggttccattatttattcatttaattgcaaatccctccttttccctctatcatttaaagttagtatgtgctctactttaattaaaaataatattttggaaataacttaaaaacagcttaagataattgcaacactgtggtattcacaaaaccaagtgttggcttcctgtgttttgtagatgctgtgcagggcatgtgtttttgacctctgttctgaattaccgggtttattatggctttctcttcacaccgtgggcttgtcctttcttggacttaccatggttttaaagtaggtgattgtatgtggaaataacgaatgtccacttccgttgcctgtgctgctgacacggcctcttgaatgcctagcatgatgcagacacataataggcatccaaccaatcagtatctgttgaagtttgaatgaatgagtgaatgaaaatatgaatgaatggagatgcacctttatttgggtatcctatgctggatttttagaaaagttggttgtaaaaggaatttttaaaattgaattctactattaaactgaaaattaatttatttgtatggaaatactaacaataaattttggaaacatttgaagaaaggaataagacagaggttggttcctctgtctttttgttacacagaattttttgtgagattcttccacttactaccccattttttcttggcattatctgtggccgccttcaggcatcagtcatgattcttgctgttataataaaacaaagccttatataagaaagatatgcatattcctgacacttaattccattcacagaaaagtaatgcttggttttctataaaaaaagtatcctaaagaggtatagccagcatccgtagcaaagtaatccataacttactgttttcttggtcagtgttccttcctgtcaggcaaagttaaaatctttcttttgcaagtggaaaagccgacgttcataactactgctgattgtgcccattttagagcaggatgtttccctctgccaggaagatgtccagttccagggtatggaatttgtctttgtcagtaggcgtctcttcatcttatttgttgattcttcattgttctgaaacctctcgtcccagaggttagcttcagttccgggaaaacaaggttttccaaataaagtccacttctgctctgccgtgtttcattcgttattttcactgtcagctcagaatgctcacctggaaaatgccagtgccctgctggtttttctgtagtcctctcactttctaattgtgtggcttcaagggcaggacattatgctctcattcattacagtctctaggccactttcctcccaaggctttctggtgcatatcagccaaaacatcagcaatatcttattatagcccatggggtttgtgtgggacttaaatttcctgaggtgccagacttccaggaattctactttccaaaacatggggttgcctgtcagtgaaagcaatgtctttctttatccagctcttggctgccctgtagtgactgtgatgaaccgcagatttgttcatggatgctggcagttaacttagttttgtaggaggggttggattaaagcaaggtgcctttatttagctgggaaaacaaaagattgtagggggccatggttaaatgtctaccagtacttaaagagctatcgcatagaaaagcaattacacttaatgtaggtggcgtcagaatgcagcgctaagatgcattgatgggctgggcaaaagttagagggaggccagtgtggtggggtggaggggacaggatttcttgtgcatagagcagtgtgaaaggagggtgatggcgtcagacttccagttctcagagacaggggtgggagggtgtttcaggttaggctggatgactgctggtggagggtgggatggggacgtcgtgcaaaggattcttgcaagggatggttgcaatagataaatagataatttaaaaagatgccttccagctctgaaatcccatggttttattatgctaaggtaagccattttagggcagcttcactcttttcctttccctttctctttctttttccctctgtaattgtggaatctatttgtgtgtgtggcttatgctaaagaagtcttaatcatgtattatttcctatcctcttactttgaaatggtcagacttctagctgagttgtgtttgggcactgtagagggaggcagggtgtctgtgtacagttgtgctgggtgtttactgcacaaaggacagaaataaggggctaaacttgaacacatactctgctcaccaagctacccagaggaagagtctatctttccagtttgcggaaagcgccatcagctcaccaagctgagtgccagaggggctaggtctccccagaagaggcatagttttctaatctgttagattagaggtttctagtctaatctgaagatgctggtcatgactctagagggaggcataacatatcatttttaatttatcaggattgacaaagttaagtctagacacatctgtgaattccgtggtgggctgtacaaacacagtgctaactattgctactaacggtgcaaagttccattaagcatccacgtatttctgcggactcaccaagcattcaggtccttggaagcatctggaggatttgctcaagttttcacttttcatctggatatttgacattgtgtgcacacagctctgtgcattctccttctagcccaggagattccttttgactcttccattcaccctcaatcctcaggggcaataaatttggttgaaaagcagttgaggatttatgaatgtgaggcacataaaacccctttggattctcagacttacactaaacaaacttgtgagtgtgccagtgaagaggaaaaagtttaaaaaatccagcacgccaccggcaaggttggttattttttaaaacaacaacaacagtaaacaaaatggaaacaaaacacaggtcgcgttgctgatagcaggcagcagttctttgagcaggcgtgaagagatgcagagattgctgtgcatttgtgaagtgtccccagagacagattccttaagcctttctccaccctctggccttgtcactgttcctccctcctctggaatgtggaggaaatactccccacccatccattcacaaaaaccctggaagagagccaccttccctccacttttctcatctgccagctcctgctctgttctctggcccctctgcatcgcctgccctcagtgccattctcagtcagcaagggcagaactctcgctgtcccctgccttcagtgtcagccctgtgactgttgtcctgcgacctgtttcttatgcccaaataccctcagtcgcctgagttgaatacactccgtgcttctgtgcaagttcatgagttggtgccatttctttttagctaccctgatgcttttgtgtttctgttttttgtttgtttgtttgtttgttttccctttgagacagggtcactgtcgcccaggctggagtgcagcggtgtgatctcggctcacgcagccccgacctcccgggctcaaggggtccttccacttcagcctcctgagtagctgggactacagacttgcaccttcacacctggctaattattttattttattttattttattttgagcagagacagggtcttgctgtgttgcccaggctggtctcaaactcctgggctcaagcagtttgccagcctcggcctcccaaaatgcgaggattacaggtgtgagccgccacacctgacacaattttgtgttccatttctttctttggaaatcttcacagtctttaattactacaaatcagtagttcccacattgttggcagtaagaaatggaaaaaatatccgccctccccaccgccccctcccctccaaaaaaatactgtggggcagataccaacatagggataccagatatttgtccaaatatgggcatggcagggctggggtaagttgggacactggaaaatagcaaacaattcccagagcattctctgctgtcattatcatttcacaacacaaaggctgttttcacaccacgaagtaggaagaacagattattgagcagaggacattctttgaaaacgagtaactttagctgtgtgaaacattcatcacttcaatccttcttgttctcattttgtgtctatttattccatataattatagatttccaaccagtatgtagaggccactgctgcaaatgattctaaaagaaggagctcttctgtccagcagcaaaacaaatacagagcccaccagggaggcccaccttacctgggcaggaagctaccagatgccttggcaggagcccgtccttgctcatgtggccataagatctgttgtgactagggttcctattgcagctggagggacacagagattaggagcaccttgcagcctagatttctgcaggagcaagagggatgggcattggaccctgaggccttaggctggggacagcacagttctgagggccaggtgctgagtgggtgtctgtgagcatgctcagcctctgggctgtgctctcagaggacgtgcagatatcagacatttacagtgagcagcatggaaactgcgggctgcatgaggatgcctgttggacggtgaggccaggctgcccaattacggaacatgctggaactgctggggagatggaggccagaaaacacatgcttcttcctgcttgcccggctgctccacccctgcctcttttggcttttatactttccagcctgcttggccaaaaaccaaatgcaaaaaggatgagagaaacctttaggggctaaaaggaaggttcatcattgaggtatgtactgagaaatttgatttcctggtggggtgtctgggccccttggataagcggatgtacctcgggcgtgacctcacaccccgctcattaaaatcagtcttatgtgactgcagacgtggaggtgcttgtttacgagagacagagctgcctctttgcttgaggaaaattgatttccattcaacagatgtgtatggagagctggttcccccgaggctagcactggacacacacagtctattaaggcccagccctaagtgggaggattcacaccttgcagattctgctgtttgcttgatgaagtggaactaaagaatgctgtttttaaattcagatgtacatttcctgaaaagattttctatcatctgtgattaacttaagtacatattatcttctttttaaatctttccctgattttctttctccttccccacggcgtcatcctatctccccatctctcattttcctcttacttcctttcgcttctcgcttttctctctatgccagtgcattttctttttcatggagttttgcttttatttagagtaatttttataaatatttgaaactaaatttatgcttctcagaaacaagattctttctgaaaacatactttgggtgataaagatgtaatctgcttccaaatctttccaaatctgggtgtaaattatgaaacagaaaaaaaaagaagcagccatttagtacctgattatcagtccacatcaagccaagttcagtgtgccttcctgaatttgcccacttgaattcagggcacacagtagcaggcacatgtcagaccaggagttagaaacacacggcttcaggactggccatgaaggacccagggcagattatttattctgtttgaaccccagtttcctcacctgtaaaatgaaggcaatttcacagtgtttctttggataaattcagataataattatcaaagttcctggcagtatcacagtcttaatctgttcaggctgctgtaacaaaataccataaatggagtggcctataaacagtagaaatttatttctcacagttctggagactgagaagtctcagatcaaggtgccagcagatttgttgtctgatgaggacctgtcttctggttcatagatggccttcttctcactgtgtcctcacgtggtggaacggccaataggttctctggggcctctttaaaaggaaccccattcataagggctccacccttatgaacacctcccagttgccatactgccaaataccattacattggggattagagttcaatatgtgaattttagaagaatatattcagtctatagcaatgttgtaactttaaatgtttccctgaatcaatccatctttaaaccttttttaagccaagagtttgaatctcagaaatgtgtgtttattaaatgatgatttcataatctcacacccattacacatagtaatctcaggagtggttcattgattcagtaaatatttggaaatgcctactttatgccagattccttgctgtgtttatgggattcaaagattagtaagacatttttcccgccctgcctgtttacccactgtagagatgggaagtgggaaatgctagagcggatgtgtgaacaaggctggagggtgcagatgtcagggcgtcttcacaggagactgaactgggtactgaaggatgttgggtacgcagtatgtctaggtaggttttacgtgatgcattatcttcttttctgacaacatctttaatttagactaatgttgacttttggagaagtgaagttcaggattttactgaagatgatagattcctaactactggcctaactgtctggcaccattttatttttcaatgctttcatcttcttcaagtggagaccgtaagtatgctcatatacttgtacagggcaccaaacaaagcacatcgtcctcagagatacagtgaacagtcaaggaaagagatgcacagtgaatactagaaagtcagctggcccctcacgtgacacccacatgcctaacatcatcatcagcaccatcattactattgttctcacttcttttattaactctgttattatttatggttcatggtaatgcattatcagattgtagcacttttatttctaccttttcctcttttctgagtctcttcacatgccaatctacatctgaagcttgagagacagatttagggccccatcctgactccttatcttgggttatcttgggtgctcactagataggtgatttagtgtctttatgcctcagtgttcgcagctgagaaatgaggattcagatatctacgtcactggaatgtgaaaaggactgggtgaggtcatgtgtgttaagcatagcacttggccaaagtgtaatagctgaagaaatagttgcagagaggttccctaagtatcttggagaatcagttatcttggttccccaattacatagtgagctgctttcagaacttgaatcaaagccacagtcttttgcctcctagtcctgctttttttttttaataagatacatttgatctttgaatcatgtcactgtataaatcggagattggataaaaagttcagctatttatggcactgtggggggtttaaggacatgtgtacaagtttttgatactcctgccctcaggaggtgggacttccttcctctttccttaatgacttacttccagtgaagtgatgggatggcacttctaaaattagattacaaaaggactgtgactcaggtggctctcttgccctccctcttgaatccctcactctggggtggacagtggccatgccatgaggacactcagctggtggagaggctgtatggggaggagccaagtctggaaacatactctcccccagtcaggccttgaggtgactgcagcctcctgagagaccctcagccggagccacccagctaagccgcttccggattctctaccctccaaaagtgtgagttagtacatgttcactattttcacctgctacatggaaggtcaattgtgattaactcagcatctatctgcagaatggagttcaaagcgtcttaagctttgagtttgctgtatgttataatatgccacaattaggcatttctgcgccagtgtgaccggcgaactgagatggcactcccatatccttgtattcagggggttgttaaagacaaaagtttcaaatgaccctgcttgacttagggacaagccggagcaggattgctgttcacctgcagttcagctcaccatgtctgagccttagataatttacgtcttatagcagaaacatttagaatcataaatgttctaatcctaggcatgggaagagatttggtgtaacttgcctggtgaggcactgaagcccaagaagttaagtgcacacccagcctgtacagctgctcggtggctgggctgttgaggttttcctcctgcatcagccagggctattgggttacatgcaacagaaactgattccaacccttgcaccaacaggaattgctgggatgacatagaattgtcttaaaattgtcagaaaatctcgagaagcaggtgctgtagaggcataggaagcaggcgtgagagtctccctgggggaatgagctctgactgcttctccttcccccaactcaggctcaggactcaggctttcagcagaggccgtctgctatcagagccaggtaccctggctgtcttgggcagtgaggctcatggattttttaaaaaaatgattcctcagggatctagaactagaaataccatttgacccagccatcccattactgggtatatacccaaaggactataaatcatgctgctataaagacacatgcacacgtatgtttacagcggcattattcacaatagcaaagacttggaaccaacccaaatgtccaacaatgatagactggattaagaaaatgtggcacatatacaccatggtatactatgcagccataaaaaatgatgagttcatgtcctttgtagggacatggatgaaattggaaaccatcattctcagtaaactattgcaagaacaaaaaaccaaacaccgcatattctcactcataggtgggaattgaacaatgagatcacatggacacaggaaggggaacatcacactctggggactgttgtggggtgggagagggtggagggatagcattgggagatatacctaatgctagatgacgagttagtgggtgcagcacaccagcatggtacatgtatatgtatgtaactaacctgcacaatgtgcacatgtaccctaaaacttaaagtataataataataaaataaataaataaataaataaaaagatactagcaaacgaaattcagcagcatattaaagcaattatacatttaaaaaaaaaaattgagacagagtcttgctttgtcgcccaagctggactgcagtggtgccaacatggctcactgcagcctccacctcccgggctcaagcaatcctactgcctcagcctcatgagtagctggaaccagaggtgtatgccaccatacctggctaatttaaagaaaaaaaaaattgtagagaccaggtcttgacgtgttgtccagggtggtctcgaactcttggactcaagcagttctcccacctcagcctcccaaagtgctgggattacaggcgggagccaccacgccagtcctggattttttatttatcaccccagaatgcctaaatacagtaggagagaagttaattctgcaaaggaaatcagagttctgtgggaagaaggaatagatgcttcacagccagaaaatgacgatgggcatactgcacatgctttcctcttctcagctcttctgagggttgttaggttctttgtttcttgtcaatatttactgctactcctactcacaggagaagagaatgtagcctcttcaaaagtcactggtatagggcggccttcccaaaacaaaattgtaaggaaacccaggtgtgtatgtttgctagcactgccagaacaaggtaccacagactgggggctcaaaacaacagaaatttattatctgtcagttctggaagctgaaagtccaaaatcaaggtattggtagggccatcctccctctgaaatcttaagggaggatccttccttgcctcttccagcttctggaagccccaggcaattcttgtctcatggcagcatcactctctgcctctcttccatggctgtcttcctgtggtgtgtctgtgtacaaacccccaccccctcttctttttcttggaaagagtcttgctctgtcacccacactggagtgcagtggtgcaatctcagctcactgaaaccttcgccccctggcttcaagtgatcctgccacctcagcctcccaagtaggtgggactacaggcgtgcaccaccacacctggctatttttttttttttttatgtttgtagagacggggttttaccatgttgcagaggttagtctcaaactcctgagctcaatcgatctgcctagtttggcctcccaaagtgctgggattactggtgtgagccaccacgcccagccacagatcccctcttataaagacactaggagtattgatttagggcccatcctaatgacctcatctaacctgattgcttctgcaaagccctatttccaaatatggtcacatttacatataccagatgtgagggtttcaacatatcttttaaagggacacagttcaacccactgcaccaggcagctgtggcttcctccttccacagcatagaaggtggccacatgctgctggactttcacagtcacagtccctttatctgtgctttggctgcaccgggcagctcccaagtctttgttttcagctccgtgagaaaatactggggttgggagtgggagacactggtattgattgacttggcatgttaactacccacttgctatgagaaagctgcctgtgtttagacttgaagaggatgacacagactttataaacacattatccaatgagcagctcttcattacaaagacatgttgatgctggttacagagaaagagagtggattggcactaacgtgcccgtgatcctcatggagagaaaatactttggcatgtgcatgctgtcacagagacttctagaatgtcagactgtttcgaaagtgtgttttgtcttatatttaaaatatcatggccagatgcagtggatcatgcctgtaatcccagcactttgggaggccaatgtgggaggatcacttgaggccacaagtacgggaccagcctgggcaacatagcaagactctgtctctacaaataattttttttaaattagtgaggtgtggtgagtgcctgtcatcccagctactcaggagaatcacttgagttcgggaggtcgcagctgcagtgagctgtgatcgcacctctgcactccagcctgggcaacagagtgagaccctgtctctaaaaataactaactaaactaacatatctctaaaaataattaaataaatataatatgttcattgcacaaaaatttaaagttacagaaaaaaacaaatctagtaaattacaaatatgtttactgttaacgaaaaaagcctgttaagtatgctctatttcaattatttcatgtattgattgaatgagtcattggttggttggtggattgcttttcagttataaaaacaatgtgtatgggagatggtgtcgaattcaaaggaagtaatcactcaaagtgagcattattgggagaatgtgaaaccttggcttgcatatgtatttcctaacccgaagttttggccttaagctgatcaaacatgtcaagttactatcaatgtagcaactggttgctctgaaaatggcatgtccagggatccctatgtggatagtggggaagagggcggagcatgaagtccctgggcagaactcactcagccttggtaaattgtactccttgatatcaccaccctctccttggcacgggggagcaggcaggggatagagccactctcagggcagatgtatccctggatgaatggcgacagctcttccttttggatgccccactgttaggatcacccacaagggtcccctcttctacccacgcaagcttatgtatttcagcctcaaaacactctgagagaataaataggaattgggttgtgatatttgcgacctatcctctctgtacccaagcaggataaagagagttctatactgggcccattttatttccgttttctcttggggtagctgaaaaatctgacccaatggggaataagggacatttgtaattggggtgaaaagcattgctagaaatgaggcattgtggtagtcccaaatgatagggtggaagatagcctaaattgacacagcactttccagcttgtaaagcatatttataaacacgatcttattttggtttggattcctaaaatgaccagtaggtttatatggtaggttttacacctgagaaaatggatgttcagagatatggagtcatgtgtacaaggttattctggggaactgcctcagagccctctgctgtacatcgaataggagccccatgaaacagaaacacatcacctccctgatcctataggtgaggaaactgggactcaaaaacttcaagagggaaggcccctgaggtttttttttggaaatggctgacatggggctaaaatgtagagcatctttttccgttagcgtgggtcagtttttagtacattacacagagacagagagatggggataaaaacaaacttttctatggtctaataatgagaatttgttcagcgtgtgatgaggagggcatgtgcaagtacatccacattgattcctgccttcccacagccactgagcactcttcttcacgtgtcgtttctctctgtggtcatacctgcaggctgtggaaaataaatctgctttagggagtcaaggctgtggctttaggtcctcactcttccacttttcaactgtgagtcattgggcttattgcttaacctctctgagcataatctgatccgcaaagaggagataatatcatatgcctcctgggattgtcatgggatttgaataaggccagtaagttctcagaaatgggctaggcacacaggaagcagctggtagatgattttccctccctggtatgtctggtatagaacatataccctgacatctgtccactaggggtgtcgtagaaggacatggcctgagcagaactgaggcccttgaaggttgtcatggagaggaacgtaggctcataaagccaagttctgcagaattacacgtttactcacttcaggacagagaaaatggcatgataatttttaaaaagttattttttcttctttcaaaggacaaaggcttgagagagacattttgttaaattttagatcagtaaatgctgtttgccaagtaatgtctaagagaggggatcctggccatttccatggacacgagagcccctgctgggtcccgtgctcctggcaggctgctggtgtccaggggaaggggggctcccggggtaggccccaggcatcacctgcgtctccctccagcatctcccctcgtgcttaaccagagcctgggccagggcctgtgaggctgagaccgtctggggtctgatgcctgctgcttcctgtctcacatctcccgccccctgcccctccatcttccagggggagcgactgtctctaatagggtggctgtgacagatgctgtgggaattctgagtttgggataatgagctgtcatatgtcatttcacttaaacacaataatacaaatattttgatcaaacattttctccagctgttgaacgaaagcaataaaagcagcagggagtgccagtgaattctctgtttctgaaacgctttaccctttaaaagctgttgcctgttaactccttctatctctgtctgtctcctttccctctccttttcctggcctctctgatttcccactgcatgcctagtctggggctataaataaagaggctgaattcagggatgtgaagggggtgaaattgagcacagctttttattaaacatcccttaggctggccgcagagcaaccgcagctgctgtgaacttgtaaaacctggcttggcctggccactgcagcacagcctccaagtgtttccccaaccctcacaatcacatccaacttttaggcaacagtcttttgagataacctatctttgatggcaccaggcccttggagctctgtggctggagtctggtttcatggctgatttccatggcagagttctctgggcccttgctgcttactctccatgctctgacctggcttctggaatctcttccttccccctctccaggcagagagggatgtggctgctccaggcaaagtggagggtcaggagtctgaagggaccctgaacacccgctcttggaggatcttagcagttctccttgccagtgggcagcaaaggtgtgaccgctttgaatgcgtccttcaggctgaaactcccaagaggaatgccctgtaccctgctccccttttaaaccatgacctctgactcagcaatgctaccaagtttgaagtttctcccgtgagcctgctgtttaggggtgggaccagatcaggtgctttacttgacactggacactctttaaagccagcccgttcctgtactctcccatccctctcctttatttctggggaagcgagtttgagctaacctgcgtcctattctggattctagggaccctgactccatcggtactctcctttctcacttcattcttcctccacttcggtggctccagtgccttccacccataaacaaacagagtcaaaacatccacacagcacttctggccttgggtcttctctagctgctgccctgtcttctctatttgcagccgaacatcccggagtgcaccacagtgttcaccctggcttctccacccgtcagctccctgcagtgcacacaccctggctccggaagctgtgcatcttgcctgaaactgcctcctccctctggccccttggaggcccctgactggtggttgtcctgtgtctctcctatttcctccttgcacaactctgcttcctcccctcatcccttaactgccagcctccctccaggtttcctcttcctgtaccttccctggagatatcactaactctgatgtcaccatccactcctgtgatcgcctctcccgcctccatctccaggctagacgtggctctcaaatcccagatccacctccctccagacatctaccaggagcctggctgtggtggtcacctcaaaccccacctgtctcaggctgaatccatgctttctcctccctcctcttgtgtcctctcctgcttccttctctgttgctgccttggtcccaggaccatcattaacactcacctgggccagaaccttagagtcagcccaccttccatctttctcttctcacccatctcctgtgtcctttacttctgcttctcccagagcccctcctccatcccattcatttcccttccactgccctgccttggttttttgagtctttacatctcttgttctccaccttcatttcattccactccaacccattctccatgttaccaccaaagtaatacttccaaaagatgtgtttgatcattccagtctcctgctgagccttccgtgctctcttgcatggtgtaggagccctgaacaggcctggcctcatcttcttgcacgcttccgtggttcccggagggtctccagcagcagcagcctcatctgggagcttactaggaatgcaaattctcaggctccaccccaggcctactgagtcagaaactgctggggtggagcctagcagtcttcattgtaacaagctctgcaggaacttggaggcaaggtcaagttggaggaccgatgctggaaagcaacactgagctgcttaggagtcaccaagcacgcccttgcccccgagcaggctgtgcttgtctgtggtgtcttttctccacactcctggtcacctttctgagcaaggcttttcctcaaggagaggaggttcctctggccctcatccttcccctacctagtcctctgcccactgctccctcatgtgcggtctttggacctgggatgcttttgagctgttgtgcttgtgggtggctttgtgactcctcagtccacgtgcttccttcccctctggggctccttggagcaactggcttattaggcttttgggaatccgtggggcctggtacctggcagtgctgcttagatctgcagagtgaattgtctttttttttaattaattttttttttttgacacagagtctcactttgtcacccaggctggagtgcagtggcttaatcttggctcactgcaacctctgcctcccagattcaagcaattctcctgcctcagcctctcgggtagctgggattacaggtgcccaccaccatgccctatttttttgtatttttagtagagatggggtttcgacatgttggccaggctggtctcgaactcctgacctcaagtgatccacctgcctcagcctcccaaagtgctgggattacaggcgcccaccaccatgccctaattttttgtatttttagtagagacggggttttaccatgttgtccaggctggtcttgaactccggacctcaagtgatccacctgcctcagcctcccaaagtgctgggattacaggtgtgagccaccacaccctgtctagtgaattggttttgacttgttcctgtattcagcaactacttactgaatcctgaggtgttaggactgaagcagcacagaacagaattcgtggttctaattgtcctgtctaaactttaagagtcagcatcgttgaagagctaagaacagctgagtatcaacccagcaatgatttgaagggcgggcagtgcaagggagatagtgaccttgagggaaatactgtgactccttcctgaaacttcctttaaaccccaagacccttcttgggcactggcctctcctcatctcctgcttgacttttgcgcccttcctctctgtttccttagtaggataatgcagaatgaaagtcaatttttggtatcttttttctgcattgaagaagggagttggactttagcactcagtcctgagtttatttggggagtgtggccctttcctgattttcacttcctgaggacctctggctttggataaagaaacagtgtttattctttggggacaaagatttttctgaaagctcccatacaggagtgttctctagctcttaagattccccattaatgtgtttgtttttccttttgtaaatttgttacattagcatttaattactcttcatgacagtattaaatttcatgagtgatttatagtgatttatagttataatagagacttgtatgatttattacagttggcatttgaggtttaccaaattcttaagagccataagcactgaaattgcttaatctgaccctgtccagaacaaccacagcatgtgtgaaaacccaaatttaagtataataggaacagctgcaccacccaccccatttttatttgatgttactgtctacgattgtggtaaccgtatatatgggggacagtggtggtgagtatatgtgtttcttatgtagaaaagagaagggaaccttttttttttttttttttgagacattgttttgctgttgttgcccaggctggagtgcaatagggcgatctcagctcactgcaaccgccgcctcccgggttcaagtgattctcctgcctcagcctcccgactagctgggattacaggcatgtgccaccacacccggctaattttgtatttttagtagagacggggtttctccatgttggacaggctggtctcgaactcctgacctcaggtgatttgcccatgctgggcgcccttctgtttttaaaaacaagatcctggccaggcgcggtggctcatgcctgtaatcccagcactctgggaggccgaggcaggtggatcacctgaggtcagaagtttgaaaccagcctggtcaacatggtgaaacctcgtctctggtaaaaatgcaaaaattagccaggcgtggtggcgggtgtctgtaatcccagttactcaggaggctgaggcaggagaattgcttgaactccagagacggaggttgcagtgagctgagatcgcaccactgcactccagcctgggcaacagagcaagactccgtctcaataaataaataaataaataaataaataaataaaatgaaataaaataaaagatgagccccaaatcctgtgccctggatggataggtataacctgtcatctgttggtcaactgaagagctgactctggtgcgttcctcctgtggttctgagataaaagccggggcagtgcggtgcccactggactgagagttggggcttgcctgctgtgcgacagatggcttcaaacctcaatgggcagctgaccctgcctcagggtctctcgcaaagaagtgcccagactttaacctgctcatggtcagcccccacagtgttttcagtgtgccccaagtctttgttgggaacagcgttgtctccacttctgagctggaatcctgacagcacaccacgggctttgcgctcctgccctggttcttgtcttgaactttccatccctgtgtcctcttgctgctccagcctgtgtgtttttctcaggcacaacttccggctgttgcttaaattaataattatcttaatgaggtgttgcttcgttattattttcaccggggtaggggaggtgtagctgctcgctttggtgttttctcagatgactttatccacttgcatttgcagagaaaaaggtgtgctcttggactctgccttctcctgcacgggtggtgtggataatcctccagggtccttggccgcagggcagataatctcttcggggttatctgttaattaccagtgaatgtgtgaagtatttgtgcaaaggcttttgaagtgagctccacgcactgttgcctgggccgccactggccctgcttcccaggcagagggtttcgaggcccagcttggttcccctcaagtgctggtggtattctcttgctaaattgtttgcctttctaatgaagtgaactgtttgtttgactctgcggtagaaggtatttaactggggactaaagtaaacgttgaagacattcaaataagccatgcatatctgctttgtggagggaaggaaaacagtttggcctcactcacctccgggaagaatcgttaaggaactgtttaaataataaactgagccgagcgagcggatattgctgcagcccagtctggggcttttgtgctagtcctggctggcctgggaattcctctgtagcagccacgaggggagaagagagcggctggattcttgcagttagtaattgtgatttatatatgtgtagagggacttctgctgtgttcggtctaaacaagcccaattagccctcaggacagcaggccggtggatggcgactgtgttagcacagtgtgcgcaggccccagtggcagcaagagagcatcgtcgtggggttgatgtctggcccgtgttctgccagatctggcctggttaggggcctgctgcctgctaggctgggtccctggtgcctgggagaagtgtctgagcgactggggccaggggaccaaagtgtaagcctgaggcagggcctgggtgaggtaggggacctgtacctgggcagtgaaggcaggatgtgtgcaatcacccagtgtacccatgacaatgtctgttagcagcttttagcttttgttgttggcaagggtgaagcagagaaggttggaagtgggagtacttttgtgggaaatacaggtgtactcaggaccagctccatagtttgtgaggcccagtgcaaaaagaaaatggggagcccttgttgaaaaattactaagaatttcaagatggctactgcgcgtaacattaaaccatgctcgggcccttctgaccacaggcccaggggctgcacaggccccatgcctgggtagttggccctgctgtagcttacagagcactgtagtcaggcacatctggacttgaggccaagctttgtcagttcctaactgagcgactttaacttcttaccttctctatccctattttctcatttgcaaaatagcatatgaatacctacttccttagattgtcatgtggtataagcaagaaaatatatgaagagtgtttagggcagtccttagtacctgtgagtgctcagtaaatgatagttcttttttgagcgtatttgtagctgtaactttttttcttttccctgaaggttaagctgaggacagtgtctgtctagtgtgaagttcaggagacagagtgaggtccttgccacagaccttacttagggacagagatatggaggactcttcctgggtcttatgatcagagaatgcttgagggcaagagagaagcatgacctgaaccttcagattacttgcaaagctgaagacacccacataaagttgttgactctcatggtaacttgggtgtttatgttgaggaagaaggacttagaaggaacggtgacttcttaaacatgggtacagtcatgtgctgcctaaggatattcaggtcaaggactgaccacatgtaagacagtggtcccataagattataatggagctgaagaattcctatcacctagtgacattgtggctatcataacgtcatagtacagtcactttacttttcataaatttagtgcagcctaagtgtacagtgtttataaagtcaacagtactgtacagggatgtcctaggtcttcacattcattcaccactcactcactgactcacccagagcaatttccagtcctacaagctccattaatggtaagtgctctatataggtgtagcattttaaaaatattttaatactgtatttttgctgtaccttttctatgtttagatatgcttagatacaccaatatttatcattgtgttacggttgcctacaggattcagtatggggacatgctaccgtaccgttatagcctacgagtaataggctataccatacagcatgggcgtgtagtaggctccaccatctaggtgtgtgtaagtgcactccatgatgttcacacaatgacacaatcatctaaagacatatttcttagaatgcatcccattgttaagagatgcatgactgttattcagaatttatgaaccaccttcacttatgtcacctggggccttgtacaactttgtggagtcaacagagttaagtcttactagccttattttacggatgaaagaaaatttatattatggctgtagtgattattgtaatttgtttttatagaaatctagaaaatacgtctttaaatgggggagccttttcagctgccttgggcaaaatggagagcagataaattcccatgggaagggtgtacccagccaagggttgcagcatgcatcattcagtgtgctgagtatttggccttttcccgattttggagaaggtaaaactcagtagaaaggatggcttttctaaggattcatattgagggtgataaattctgtacaagtatatattggtgtcaagatgaccagtaggttgccatcaatttggtctgttgcctagtgtcagttattaaatccatgctttgtttcaaatgttttgtttaaatcccgtattatcatgcttcaagtcattagtaacagttggaaacagcaaagaagcatgagaagcagtcttgcactctcaaaatgagtgtaggccacaccctctgattagtggaaactcattgaggaagtgcagattggggtcatctttgtgtgagtgtgtccactattacgcatccatgtgttgaggctatagtccctagggctgtaggtgtggacctaggcgtacaaggtatagatgcagactccagaagcagaccatgttctctgtccttaggggcacttggagcacatggacatcattgacatcagatacctaccaagtatagtttatgaagactggtctagaagccaggggttactttgtagagagggaggagaggactcagatggagatcacattagagcctgagtcttgttagacaaggtaagcagctgctgagtccagatgaagggccagtgagatcaccactgaggctgcagaagcggaagtgcgcaagagagcttgaggcctcagggaagcacaggcagcagacagccagtggcctaggctcagtgaaaggagcctcaggaccactgcctccccagagaggagagtccccatcagagcccagctgaataggtttgttgacacccccaagcctatcatcctccccagtcctaaaacagaacgctggcaaactgaattcctctgggatgtgtctgagcacattagcttgtctggactgcaggaatcatggaggggaagagtgggcaatgagtggcctctgccttttatgggcatggtgggcttgcaggcccaggcaggatgcctcttgcctatagcataggttagacatccaaggcattaccataggagcaggtgctctaaggggtggacggtcagagatagtctgaaattcattcagcattccaactggaattaagctaagaatcaaaataggaagccagatgagattgcgaggaagggaagggtagccaacaagagaggaagccactagtgggaacttcagagagtggagcttggagtagttctgaaccagcctgcaggcagctgtggggctttttatctgcacatccagcaatgagtatgaggtagctgcaaagtggacggtggacttgagaaggcattctaaagaagaaaggtatttcggactccttcagatgataccatttgatagatgctcacatagccaatgtctttgaggtgtgtgtaaaatgtgcagcttgtggctaacatagggttgcagagaaaggagaaatagaagaaaaatggggaatgttttctacttgtactcccatgagccaagaaatgtgaagtggatttttttctttctaagcagcgggggattctctcccttttctatcatttccttgctcatcctttcaaggaagccatgtcgtgtgctttattgttttacagtcatggtgaaagaaacccttaaaacaaactctttgctttaaagctttatgtgtttctgcaaacaatgatgcttcttagacagtgagggttcagagtttaagggacacaagaaagtggagccttttaatgctcccagtgtgcagtaaacatgctggaatttcaatggattccaaagcgtaacaataatagcattaagtacatgccagagcctttgatgttattgatgaaaaaaaaaaaaaaagtaggtggtggtgggggcaaaggggcccctgtcatttctgtcatgagcttttaaacttttgacctccaaccttttgtgtctaagagctttttccatatgggtgttagcagcctgatcaagtatcctgaattcactggagccatcagtgtttctctgatgggaaagggcattctcagtcaaaaggtcccaaccaggattgtgattgctgagcgcccatcagtgtctgccctgtcttagaggtggtggcatggggtagggtggtgagtttactcactgaagttactcactgcccagcagaaggcaggcagcctggtcaggctggaagctgcctttcagagtgctaggatttggtccagggtgtgcatgcatctgctgggccttggccctgggctcactctgaacatgggaagcatgcagaaaactgcacagggaggattccaaagaggagacagcccatacctgtgggttcccctcattttgcctgttgttggaggccccttaggtagatggaagtgtcctgcagtttccaggagggatggctagcctggtccaccactgtcattgcgtggcctcagtttcctttcatgtctttcctcccccttttcacctttcctagaacatacatttattgagttcctgctgggtatacacggataagtgggcctcttctgccctcacaccccagacctcctgggagggaaagaagacagttctgacctgtgggtgtgtgcaccctggcagggactcatccccatactgcccagcaggaaaggcagtgtggtgtgctcacccccatggctgtgttggtataagctctgtattcagtaaatgtgtgcttgtctgaggaagcgcactgaggatgagcacagggccgtcagagggcaaggcagtggggaggacatgatgcgggtccaagtagaattcctcgggtcgtccctactggttctggccaacctgaattatggagaagggaggaaggagcactcgatcccatggagccccctgggaagcctgatggagggggtggtgtttgtattgagtcttgaagagggggtaagacttgggtaagagggaatttgtcctcaactgaggggacaccataagccatgaagtgcatggtgcctgagggggcactgactctcggatggggaggtgtcctggacagagcttggtggctggggcctcaaactcatggtgaagagcttgggctggagtggggaggctatcttgggctactatacattttgggagaagggagggatatggttcagacttggttttagggatgctggtgtggggagtatagtttagataagctatgataaaaagccttaactctgacattgttgtgtcaggaagtggaatgtctaagagccctggttctgaagtaagaaagacacacagctctactactgtctccccctgtaacactggagaaggtcagtttccccatccataagaatgggcgtatgaatagtacctgcttctcagggtcaggccccaggaagaaataaatgaggtgaatctaaaaggcattgcacattgcttgacctgcattaaagtattcagtgacttgcacttgtgctcatcaagattgttttattattttttattaattactatttatggggcaaaccttggaagacctttagttgttgattgacaggaactgcagatggagtggatggtccagataaaagaagcagagtcaataatccttcagagcttcttgcctggttttgagcaaaatgaatgtgcctcattcatttcttaattgctacaaagttgccaaccagcacactcttgaaatactgctggtcttccagagacttccaaatatttctggaagtgattctttatgattgatggcagcattctctcttgtgcaactgtgaagacaagggtaaacctcttgatatgctgagcctgagccccgacaatctctggcaggcttgcatttgtgctgcctgagagctcctcagggttgccgcctccaaagcaggattgacatttcatgaaggtacctgggtttccctgccctggcagggatcacgtttgaagtgccaagtcctgtgtgctctggtattggaatagaaagagcaccaaacttgcatcataaggccatagttttatgcaacactgggtagatcatttagcttttttgagtggataataaaattttcccttcttagttctcaggattgtcttgataatagaacttaagaagaaacaagacttaggagaataataataacgttttgggaatgcttattttatgtcaagaggattccttaagaagatatatactattatgaaatatactatcttattttgctttcacatttccctacctgcttctgctagttttgcaacactgaaagctctttttgcagcaggttaattttgaatagaatacaacttccaaacctcccctttgtggatcagttgttggtttcctaactaaaccaggcttagtttaaacttctgatcctattgactccagggtctccgtagttagatctgagataaccaaacagtttttatggaaacatttcctcttctgctttcatttcataaccattcgagaccagcctggctcacatggtgaatccttgtctctactaaaaatacaaaaattagccgggcgtggtggtgggcacctgtaatcccagctactcgggaggctgaggcacgagaatcgcttgaacccgggaggtggaggttgcagtgagctgagattgtgccactgcagtccagcctgggcaatagagtgagactcaatctaaaaaaaaaaaaaaaaaaaaaaaaaaaaagaatccaaatgcatatttttagagctataactgtgacttttgaattttgtgatacaaaaatacagtcattgatttaaaaatttgtcactggtaactaatttccatttttaatttccaagcttatttattgtcactgaaaatacaccattagcatatttcaaagtaaacagatttgtcacttttaagtgattccttatatgtttacatgtgatttccctgagagagttctgcagttcagctagaatggatgtaaacctttccttatttctctttgctgcctttccctctggttatttcttctctcttatcctggcaggaaagctgaaaacaacaaaaatgttggatgcatatatgtggaatcacaggcaagacacattccagagtctctgtttggaaggatatggctggtcagccagtacgtagatgtggttttctttccaccactgggcatccactggatgtgatcttgaagggagaaacatgcagacttacggacagaagaagttagaagtttccagaaaggggcgagatcagttgttggttcacgactgaggacatacctgaagcagtaaaggcagaggtttcttttgtcagttcacttgcagaggaacatttggcattttcttgtgggaaacacatgaccatgtttgttgaggagcacagaagggatctatctgactgtttaaaaaaaaggatgaattgtgggtgtggccagagtgtagtgatgggtagcatttaggtctaaaatactaattaatttaatagtctgcatgcttacacaaaagaaatgataaaaagcttgttatttgagtagtggagaatgtccgtggaagtttatagaccaggagtcaagactgtcaggtagttgccagaagtaaaagcttattgggttttagaaatagcttactttttattgttaattagcattttatgtaaatttgtatttgttttacttaatttataaggtaacttcaattttcaaatgcttagctactgctattattgctagatttatggttaatttcatccattatcttgaaatttgtctacttgttacgggttttgctaaaattagatgagatgtctattgattaatgattaatatgaacacttttactatattaagtcagtcacacaagttagcatatgaagaaagtgcattgaaaatacttgatgtacttagtgttatcgcttagacaacacaataaataaaaaattgatatttttttttctgaaatgtaataatttctgcaaattactttatcatggtacactggaatagggtttgtcaacctttttccataaaggataagataacaaatgtgttaggccatgggtttcctgtctcagctggtcagctctgttgttggcgtgggaaagcagccataggcaatatgtaaacaaataagtatggcagtattccaataaaactttatttacaaagcaacctaagtgtccatcaacagatgaatgggtaaagaaaatgtggtacatatacacagtggagtactattcagatgtaaagaagaatgaaatcctgtcatttgcaacaacatggatggaactgtaggtcatgatgttaagtgaaataagccaggtgcagaaagaacttgatctcacttatttgtgggacctaaacattaaaatgattgaactcagagggatagagaatagatggatggttaccagaggctaggaaggatagtgggggttgagcagggagtgggaatggttaatgggtacaaaaaaatagaaagattgaatgagacccaatgtttgttagcacagcatggtgactatagtcaaaagcaatgtaattgtacattttaaaataatgaagagagtataattggattgtttatagcacgcataataaatgcttgaggtgatggataccccatttgccctgatatgcttgttatgtgttgcatgcctgtgtcaaaatatctcatgtgacccataaatatgtacatctactatgtacctataaaaaattaaaaaattaaaacataactttatttacaaaaaccggcccacatgtgatagtttgcagtttcctcctatagcatatactcttcaagttaaggctcctgccattgtgtaaagtgacaaaataatagataatttaaaaaaaaagtttcagggcatttttacaggatttctagagtatgctagaaccacagcttctttaaacttgcattaccctatagaagatcatataaatacgatgtctcattctgatgattccggaggagtttctaaccccacataatatgcttgtgagaccagaaaaaagattcctagtgctccatgaggtgatgctgtggggattctgcccagcaagtcctcagcggggccctgtgggggtagcacttcttagattccgctcacggtagatcatggtgggccacagactgtcttgctcaaaacacgttgctctagactctccttgtcaggttacctggggtgtcctcagagggcggatcagctcatttctggtgccgtgtcatccataggcaggaattgcaaggttgtctgagttagtaagtcagtctgcatcttggagtcagtccaaatggcctcccacagtgcactgagccctggaaaaacgacttgcaggcacgaggatgatgactggagaagctccatggtgggaagagacagtgatgaggcctgggctgcctctctactatctcactagagtgagttccttggcagtcggatctctcattctgtctctcctcttctctccctctcctgcttgagacctttcattttatagaagctggatggtgattttggttgtagcatagcggatgctgtttaatgatatttctgctgatggcagatgattgaatgagtttgaggggactggccattcctacaggctggactaactctaatgacagaaaatcatccctagctgattgagatgattccaagctgattgagtaaattccaaggccagggtacagacgacttcagtatttaaatcacccatgaggacttctgcacttagcagtttactcttgcactgtttcccgggcactttcagaccattcaagtatcatttggtgaattactccttcagggcactaactgagagactttgatctctcttttttaatctgcaatttttgtatgtaaatttcaaaccttaaaagacagtttcccaggatggcatccaagagatcttatagcctgaggatactataactatttcttgggagaaggatgcaactagagataaatctccaagtgtctttctcggttattctctggctacaggttttatgatcaacccaggctgttgtgaagagacctaaaaatcaatgcctctcgttcctaatgagacccttaatgctcaacgtgatgacagccagtgtgaaatggaatactgacaactctacccagcacaaatatttttgctatgcatttcagtttaaacatgtgtcaagccagttacatatttatagggtttaaagaccattccactcaagcctgggagagtgcacactcttcaaatctctgtttagtgtaagaggactcgggtacaatagtcaaacctctcgcaggtctgtaataaatcatctttgcaaccataagcatgtacagttgactgcttaccactgctccacagacccgcccccacctggtagaattttaattccctcagtaaaattgattccaccagttctgcacattattctccctgtcttccatttagcccgttagtttgctgacagtagagtacacagcacttagcagctggtttgtggagccatcagtcaggaaattgtatgataaataggaggtagccaggtttcgtggcacttccttctgcttcagcagttttcgcctgactttggagaagtcatcatgtggtgttttgtcaaggggcagggcaggagatggctgcggtgcagtaacttattacatatacgcttgagttatgatgcgtcacagctgcactgctcatgtgtaaataataaactgcgagctgggtaattatggcggctctggcgacaagggcctgttctcgtcatgtgggttttcttggacagctttttgggccgatgatggaatatgccgctgagccacatagaaacgacaaaccaagacaccagcaaggcaagtactcaacgtttgaggattcaggagcatttttcaagaaatgtgttaggattaatgccatgagatgccacgtatgttacaggacatgcccatactgcttttcattcttcatttatcctgttaagctatagtcgagcacgtcttgaattggaagaggggtgttccattgtattttcccagaaagtggcttaagaggtgtgatttctactaataaccaacacaaggtataattgtccacacagacttctgcaatccaggagaagttattttaaatttaatcaagaggggaaacgtagaaacagtgagacacttaaaccaaaatcagatgtctttggtcaaatcagatcatatccattaattttctgttctttatttaaacataattctcgaatgcagaattcataaattttcttgggacataaataagcattaagaatttggtgcagtgttaggagatgcatcacatattttcagtcagaattaacttttaaattcatagaatactgtggactcaacagtgagaaatgactacttagtgtcccagtaattgtgttttatattttcctctcaaatttattgttgcagtgctaggtcattttatcctttattctgaaagagggagagagggtgagagagagaaaatttaaaccctgaaagaataatttcttgaaaatgagaagatggcagtgtcttttaaatgtccttgatagcattgtaggttttccttgaggaagataattttatacttgttgggtacacgcttttgattttatgggattaactggttggtcttcactccatacacgtaatcactgcaacttcattataaacactcatataaaagattgtgactgttacttcggggatatatgaggcatatattaaatgtggaataaattcacacattttgagtgaaaaacgtggttttgtactttttcataattcatagttgcacccacatagagaaaaccagatacagttgacacccacttacctggtggagagaatttcatcatgcagaacacagccaaaagccatgaaataaagaagtgaaaataccttccaactctgacatagttgtcagtatccctcaaaacagccgcataaactggtgcatgtgcgatgccctgaggagatgggtacgactttatgaatgctgaattcacaccctgttctagtaagtttatttctgtgattgccaagagcagatgatgtgtgttaagtaagaagtctgcagggggcatgcgtgtttgcattggcagtgatagctgaaaggtgtggaagagaaagaagagccacccccatatttcatggccatccaccctcacccggatttgaatctgattgatttgggtttgttttaaagtttaaaatcagtaaacataaactagtatatgtcaggctttcaaacgagtgcaaaagatgaccccacttgattttttgttgttttaagaagggtgcataatttcctttgaaaatggttaaatgagagagaatgtttggctctacagagggtggcttttaactgtcaagatggctgagctatgtgcagcaatgaaggtgccaacattgctgaataaacattcaacttaaactttcaaacttaccaaatcaactttcaatatttacattacaaataataatacctacaccctttcatattaagtactaagtggtaaacttaaaatataatcaatttttatatggactttacaaaatgtgtaaagtgtgataaatgaggccgggcgcggtggctgacgcctgtaatcccagcactttgggaggccgaggcgggcagatcacgaggtcaggagatcaagaccatcctggctaacacggtgaaagcctgtgtctactaaaaatacaaaaaattagccaggcgtggtggcgggcgcctgtagtcccagctacttgggaggctgaggcaggagaatggcgtgaacccgggaggtggagctcacagtgagccgagatcgagccactgcactccagtctgggtgactgagtgagactccgtctcaaaaaaaaaaaaaaaaaaaactgtgataaatgatcaggtcattagtatatccctcacctgttgaattttcagcattgttgtatatcacgatactacagtgacagtgatacaagatcaaactgattccttcctctttccatgccccccactccctccctactcaatcttatgacagtcacaaagtacggtgagtcattgacatttcagtaaaatagtcctctgggaagttttctagattctagatctggtggtaaactgtagaattacagcctcgggtccttccctggtagaccacagagcttctatgaatgctatgctcatcgttttttttactcttactggatttttttcttcataaacagagtcttatattcttgaaggcagcagggacaaaatcaaaacaagggaagcaatgtactataactttaaaaacatgtttgttgtgcttatattctactagttgcttgttgaagaaaatttggaaaatagagaaatgggtagggaagaaaatcaaaaccacctgaattcaacattacacacatctaataatcatccatttccacccagttgggatggcggtgttgccgacctcgggggatgcagccgacttcagcggggggacgctctgtgcattcttaggtggtcgatcagaacctgtccgctgagagaaggccccattggaattgcctttagagactgctaccctcagcactagggtgaaataactggaagccattctgaggcttgtgggtgtacacaccaatcctcagcagtgttggctctaggcaggctcccagcatgaccagtgtggacccgtcacatttgaagaacatgtcctggcacattttgctgtcgtatttagtctcatagacatggagtcaaacctccaagttttggaccccttcattttgcttcttgaaacttgggaaaaccttgactcatcagtcatgcttctaagtataaaatctgttaaaactctcttcagtttttacagtgaatcacttttttttttttaataaaggtttattttcagtgacaatgggtgtgagttactaggagtaagtgggggtgggagagctatttttaaggaagagcacacacccagcagctcaggaacccggagcgttggactggggaaaggtggaagcaggagagggcctgggtccaaggtgaatgttaacactaccttgggaggaattccctgagtttggctctagatgtctgtgagtctgagtgggtcagcttatctcttcctggagggctgcacagtgtttccctggacagggcatagatttgctgcctttgtgtggggactatggaggcctagcccggccaagaaggaggggaatatgtatttaagttaaaaaaaaaaaaaagaagcacatgcatgcatgtgtatatcagccacagattctagcaagcctttcactcttaaaagtatggtgagcatgggagaaatgaaactggtatttgtattacagtgtctttgtttaaaacttaacttgacaatgtagttttatttttcaaataagtgtgttttaatctcttccccttggctttgtggctcccttcagcccttctcctctggtcagcctgtctttcaagatagggagcctgtgttgctcctctctttcttgctttcgtgtctgggtttgagttgcagtcagtcccaggctctgccttctcaggtaggtgcaggcactacttacttagtcacactgctgcagtacctcacagagcttcataactaaccttaaagagttcttttacaaattcttagattaagtgtaggtagtgaagatacaatagtatagcaatgttgctttgtgaatcggaatgctgtttgaaagtgttcatttgatatagattgggctctctcttcttttcagaccctcctcatcttttccctgccttccatcctcctgtaccaattgatgccagacatcatgagggccgttaccattacgatccatctccgattcctccattgcatatgtaagtattaacactttcttcattaatgaaatggaacgagatgctggcttttaccatctcaggactttttgttaatggcatgtccactgggctttgaagatgtgatagaagtgtaagatttacttttgaaatatagcaagcctatctgttcgtgggttcactgaagcaaatccctgctgcttcctgaggaatgcctgtcacactaggtcgccgacaagtatttcctatatattttgctgacgtgtgttctgtgggctgtaaatactaaattaaaaagtaaaagcctaatggaaagttaccactcagaatatgtatttggtcgacattaggtttgaagtttgttatgttcaaatttctgtaacatgaaagtcctgttctggggatcacaaggaattgtaatgaaatttttatggtaaattttcatagcccctatgtaagtacaccagaagtcacttgattgataggaatgtcagccaaacaaaatggcaaatgtgatcgagcacatggtttacagaaagataaaaggaaagaatgctagtgataacatacattagaaaaggaaaaaggaaatctcttggaagtaaataccatcttccttggtttggaggaaataaaggatggtggagttgcaaagtaaaacagtatttttttgtagtactgtccaggaaactgtcatgtaccataataattggagccactctctgggatgggctgtcccttgctaacggccttgatatatacatttattcatatctaataatcaccctttattctgagacagtaaagttagaaaagcacaaataatactttgaagaataatgctggttattcagacggtagattgcatctccgtggctattagttacagctgtgtaattacatattatgccaaagaaaaatgaagttgttttaaaacaagtcctcctctgtgaacagaattaattgatattaacaatcctaactacatgcccaagtacacatataatattttaccaacagttttttggatccatctcccattactgaattgtaatttcagagcagatttgcctggaggtaagtaataaatctgtgttgcagacttctataagcattaaaggagaagtgggtatttatagagagagaatgcagaaacttgtgactgatcctttgagttttcactggaacacaagtaagtatttacagggttctgaagcctgctaaaaataccctctaataaaaccaggaggccaatttaaaattctctatacaaagggaaggaaattcctagttcagcctgaaacatgacatgtaattcaccccattatacagaggttttatgatacagatgtgaccacatgggtctcagatgaggatctgccccatggttcagagcatgcaagggccagatagacctcggagacatggatggctaattcctcccagactggagcctttgtgatgtacttaatttaagtcagattttctccggaattttggagttcttcattctttcagaaatgatgttctagagcaattttttaaaatgagtttatataataggctgaactatttcctctgcattcattatagtttgccttgtaattaaattcaaatatgaatttatcaataaaaaccccaagtcttggttctatggcggaatataacagcaagccctcctgtagcccctactgtgtgttctaggccctcattactgacctgcattggcccgtggtgataacatcacgagacaagatgcgtcacatctggaccatcctcgtaggcagagtcgggggagtcacatttcaggtgtgactgttgagctgggttttctttggattttagttcttcctgcttttttagccaggctttggatactttactagcatctgactaaatggttctctagcagcctaaatgtataattatcaaaaagattgatgatgtaaagctgatagataatcctgagcctcaaaagacaagtcctggaagattctgagagggaatatcattgctgcgggcacagagaatggtgagcttatgggtttgtggcctcctgggactgcctggttttagtgcatcctggcagggccctgggtggacgctatgcttatgaagtgggccccagcaagctggggcatgtcacgcccctgtgtctttgtgactgacattctgtctgcattggtctcagtggccttccctctctgcatggtgaactcctgcttatattcatcctcaaggcctaatttaagggccgtcccagagactcgcatgtagctttgttgtgatgcttttcctcttgcttggtgatttattgttaacggtcactgctcccttctagtttcatgggcagtgcccagcacttggtcaggcactttgtaaaaggtgctcagtggacactcacattggcccagtctgagagacagtggaggagcagtcagagagctcgaattcctgttcttgtgttgccactcacttgtgctgtgcactctggccactgacctttgcatgtgttggtttcgtaacgtggaaatgaagctgtctgctgtacccacctcttcagatcacagggagagttcaatgaaataatgttcatgtaagcactctgaaaagcacagagctctaaataaatgctgaaggttggcattccaggcagtggggggcatgaaaaatactgggagtttctattctgcccttgctcagttatgagaccctgggttgctcttgcaccttctgaggtatgataagtagacacctgtgatcaccttgaaagtggaggctaatcgaggcaaatgtggcttggttatagaaatcttaaaagcacgtatttgctaagggatgaatcagttacctgggaaagtaaaatcacttcatccaaaacttgaattccaaactgtttgctatataattgtcttatagaaaatgagatcaagtgaagagtactaagtttttgcaatatttttaattctaagaagacaaaatttggagatattatcattattttgtacacacaattgttcttctggtgccagctttaaaaactaaattacgagtctcctaaaaacaaggatttgtgttgatggaaatgccgacagatctctgtttagaagaagggcaggcgcttctataattatgctatcatatcctatcattaaagattctattgaaagaggtttataaattgctcctctttttagataaaccaccctatattaaggcatcaacgatatggtgcagaattaaattaaaatctcataaaatgaaatatgtttcgtattagctgtttgacacttaatttgcctctgaatgagtagaggaaatcacaaattaacctgcctttgtttttccaaccatggcttattaggtgttagaacaactgcaattacagactaataataaccactaagccttataaatatgtacggaaatacgtcagtttgtgttaaagaacccagtttgctaaacggaatgccttcagcttgccctgcttattcttacggtgttatccacagtttatggttaggcagtgtagaatgagtatagaaacttgaatggattcaaatacatcactagaaataatttataatttattggcattttgtttcttaaatcaaaattgtgaatttagactcagaacttctaagtaggacctggaatataagtagtattattctctgagttgtcacgtaaaggttgttataaaatgtacaattcctgcattgtatttgtttaattcaagtaatttgaaaattaagaaacactggatatgaggaatcttcccgtttcctcggaaagttattctccactgaattcaccaggtcttaggcccaataaacaactggaatgttgctctctctccctctctctcaaatcctttgagagacttgttaagctagattgcaagaagtataatgttttagaaaaaatatcagagtgagtctactttattactgagattattttgtgcattaatgaaagaacctgaatctatacacacatactcttattttatgtgtatatttttacttcttggtctctgtatttcctgccttgcattgttgacatcagggctgttccttccctaactcgaggagacactactgtattctatgggaacaaatgatgcctgctaggctaaaaataagtactaatttttaaaatttcacttgggaatgtaggcaattggtatattacagcctactaccccagaatacaattgcattgtcaagtggctactttccacagtaataattaaagtactttctctcttgcattttgagtgtgtgttttttgttttttagtgttagaactcaattaagcatgcttcctttttaaaagtaggcatggtgtatttgtagaaacccaaattataaagtagctttaaattccaatttgatttcattcattttggatttttcttgggaaaaagaaatgtagcccttatgtacaatctttctgagccaaggttttctaatttatggaccagtattaattgaatttcgaactgtctttctgtttcatactgagatctgcaattcattttccaaagcagggtccttggttactaatccattgcaataattaagccccaccaatcttcttgccagtcgagctgtgagctgctcttgctttgtgctgtggatgtgaacagtactgcaccccaagccagctcacataaaggctgttgcatttcaccatccactttactaatccactttcgaaaaccagcttttctgtcttagggaaaatgagcactcatgttctgttctgtacgtcagccctttttttttctttgttgagtcaatgtgtctccttccaaggctgcctgacactctctggaatcattccacctaagtaaggagagctgttcttcccactaaaagtggccacctcccttcacctcagggagaggactcagtattatgaagatcattaatatcagctgtgagacagagtgcactggaaataggtaaggcctcgcccccgtaattatggctgcctgttagggatgagagcagggagatgagaggcaagtttggcatatgaataaatacatttcttcccagagagaaaaagctctaagaaaaggtatatcattatggtaaaagcttagagaaggaaatagtaagtagatgaccagggctactactgagttcccctcccctaaatttagcacgttgcttgtcctggtattatctttactgagagctcacatacttattccaaaggagcctcttcagtctagctgcttactgaaaacactatattgggcctgttcatgtaatagtgatttcattcgttgcattcttagggaagtttccggtaaaatatggagatttagtaaaaccttataattatatttggggtcaaaactagtttggaatattttaatagtgtaacttaaaattaacaaaggaaagtttccccccgcctcctccacccagtgtttgtgctttaccataacattattaagactggtaaagtgtaatgacatatcaaattgcaaagtctagcaaatactgtagcaaaccctaaaacactccccaccgcccccccaaaaaagaaaaagaaaacatgaactaaattataattacatctctcagggtgaagacgatctgtgtatttctttgcatttgctaggctgagcccatgctctacatatggtagctcctaaataaatattatttttaatgatgataaaaataatagggtcactgctatgaccatcatttttcttttgtttctgtttgagtgtgtcacctcgtgccaacaagctaggattcaaaaaataaaagctcagtgactacttttgatagaatagattctattaatagtagctattgccacatcagatgctctccactgtcaaactaatttcctgatattaaagcagttactggtccccttatatgactgagtgctatttaatgtattgctgctttccagagccgacacatggaaataaaatgaatgaaattagccatcttaaatgaacaatttaagaagaccatagcaatatcaaagataagggcaaaaaagagatgaatagataattcagatgaaaaagtatataatcatgaccatagctgacatttttgaatacttactataggctaagcacaatattaaagactttatgtagtcataatatttatgtgtgttaatatttataacaactctatgctggagttattagtctcattttaaagacatggaaaccttgacatagagaagttactcagcttacaagtaggtagtgcccttgagttaacccaggcatcagactccacacccttgctccggacttccatgccttgctagtgaaaatgaagaccacagacttggctgctctagtttctacttcctggatgagcacaactatttctaacagtacctgataggaagttttcagtgttactggctgtcattgtcttctgcaaattcccaaggtggaaatacagcagtgtgcgaagagccataaaaagccacgttcaggccttttgacctaatgtacctattgagtaacccaaaaatgagatgcttatcagtctttgctgctgtagaatgtatgacactatacaatagaacagtttacatattcagccactggagtggtttggtaaattgtgattcatcaactgggtggagtgttgaccaatacttaatcacatttgagaagactctgttagaacatgggtagataataattagtgattatagcggtaaacccaatagaagggaagccatgttagaacacaatgtgtatctgcgtagagccttcttccttcagatacctatggcttgctccctcccttcacacatttccctgctcagtttctgcttctcagagaggtcttctgtgaacaactacttaaaacagggattggcaaactgtggcctatgggccaaatacggttcatggcctgtttttgtcaataaagttttattggaacacagtgacattccttatttagtattatctgtggcagctttagcaatacaagggcagagttgagtaactgtgacagagaatatgacctggaatgcctgaaagataaaagtttgccaaccttggtctaaaataacaccccctctccatcttcactctgtacttctttctctgctttatttttctcttttttatgagcaatgccatgtgtcatgttttctacttttatgcttttctactgctattgttcacatttttcactgcatatcatgtcaaatcaaaaaataaatgtcttattatttggttatcatttctcgtgattaactgaaaaagtttaagtcctgcctaattttcaagaactatcttaggccacctacatacatagtttcctcatagttaggaaaagatggttgagtttcaattcctaaacttttaaaattctgatgagcgggcacataaatccagatccgccgatacacactttactttgcgttaagaaacaaccacaaaacagataaattgtactcaaagggtgtatactcctttctgttttgcagtatttctaatgactgaaatactgaattcggtcctcagttgcagagaaagcaggccctaattatagtgtatattcagagtctgagccccagcttcttggataaaattcctgtgttctttgtgctgcgctcagcagcacggtccaggagcagatattgactgaggtattcacgttcactgaaccggaagccgccgactctatagagtctgctgtcaaacctgttgcgggggcctgggaggtactgggctgtaacagacttttttctttgagtacaatgcttccactcatgttaagcctggcttcaaagaaaacagaaatttactgttgtcattttatttatttttttaagtatgtgtttgagaaaactgaactttaacagaatttgtcctgatgggaagacactttgaggttaggtttatatggtgaatactgcctaaactgaagctccctgcagcctttcctatgtggccgtctctccctcacttaggtaacagagccccacttttttcacctaaacaaagacatgccatttcctatagccacactgcaagctgagttcatttcagacctttcctcgggggaacaaaggccaatgacacagggctgcctgtcactcattgttgttattgttgcatccccatccctgccccggggaaaatcacacatcagaaaataaatgttagcagatatgtttccaggaacctgcttgctaactttttgagtatgaagtaacagattagccagattttggatcttcagtgacccaagcaagctaagcacactaaaaggaaataggaggagagaggtggattttgaaactcatccttggagctctgagaaaactagggatgtttttgcagagagctatactgaaacaaatttgaaaaatacaatcttggccatttttagttttgatgtggactttgcaaaaggcagaccagagcagaaatgggcatgattgtgttgcagttcagtaaaaattaacaagttaaacggcttactggcctgtgtttacctcctgtgctgacttagctaatttggtgacattgcctcaatttttataactctgtgttgaaaaacatcaagtgcgatgctagaaatatactctgcctcttttctcttgtgtgtgtctacacacgtgtgcaggaagaaaataatgcagggagaatggtcagagtggcaggaactgccttagagcatgtgagtgcatttccaataaagataaaagtgagtgtctaacccaaagccataggtttttaaaaatcccatcacctaatattttggcatgtgcagcatcacacatgtttataagtgacagatatttaaaattttcttatgcaatacagggaggttacagattcactaaaagaaaaagttctcagttgggactcttacagggaatggaagcctggccccagactgaaaatctgaactaataccaaaatgaattgtgtgtacagttgcccttgaagacattctctttaaggctttttttttaaggttcccccatacagggtccctcattgcctggaagcacctgtaaattgttcctaaggagccctgtgcataccatggccaagtctagtatggcctaggtagccagcctaagggagttaggttaactgggcacagtaaatgattccctcaggcctgacaaggttaatatgtctttcaaaacctgggaacaagttacacatgaaacaggaaaactgccaatattcttctaaatacattcaaatagtatccaaatattgccaagttcaccataagtgaatagtatctctatcatctgatggggagtggggagagggaagctctagagttaaatgaattgcctcatttgcaaaacaaatcaccaaaccatgttgcttgaatatgctttacatttttaagacagcatggaaataaacatttccagtttactaaaatgcttcttgcctctgttcaaagtaatctctggttcccccacagagcaaaatccccatattcctagcacccattgtcgttaacatatactatgcacactaaggaaagttttcaggaacaaatttagaattgtaagtccataacgtaagcaatcagacctctgaaggggcctctgatttttcatatgttatttgccagggatataacaaattaatattagagttatgttggattatgttaatacttttattacctgccatgttgtattgatttatttaaagtaagtattttatgtttttttatatatcttcactatgttactgtatatgcgtatgtacccgtacagcactcacttctgtctgtgttccttgtagcactctaagcctgtccttgggattagtcagccaaagacagcatggtcttccatcttaaaggaagtagtcaagagggggaaaagaaggtcagcctcaagtattttaatcttgttttaatgaccaaagtcatttcagggctgcagtgatacacgtagtcattggattgagggaagaatagtccaagtcaagagtccactggaaatagaagagtgaggctggagctgtgagcagaggtgcagccttcttcagaaagccatgctaggctccattctcgcaattgaatagctgcacggttgtggatgttgtatactgtttgtgagagagaattttcaaagtttaaatccttgaacacttctggagtctctcttcatcctctggaatgtggggagcaggctgtggggatctgacccaggaggtgggtacacttccaaaggccttttcgtgatctgaagtgcgatccagagatgcactgcaccatatttaatttgtgttaacctccccacctttccccatcttttaacccagacagactggactttttagttacttaggttattattggtggtggtttctgtgtttgttggaggagggagttgagttggaagttgggagttgtggaagttgaattggaaggagtgaaaagtagagtccacccccttcccccgagtgtattggagagaaacatccttccttggtctgtttgctttgcaagggtgtcctttgatgaggtctttgtcctaggcacccactgaagtctcagtgtactcaagctttagaaaagcctgttggcccttctttgttttctttgttgaactgtttattttgctttcttcccatgaggttccctggccttgctctgacaacgcttttctgcatgaattacattcctccgagccacaagtctcctaattcttccagtccatttgattccggcctgtgtgattagtccatggcttcgatccgctgtgggtctctgccaagcagagtgcttgctaagtgcccctaacgtggagacctaaagacattttttaacctcattagtgaggagagtagtgcttcattctagtttaataacatggctactcgaatcattactagccttaaaatcagtgaaagaggctactaagtcatttggttttctttcagtgtgaataaggctattgaaggagggtagttcaggtgttacactcaagcccaagttagtaacataaatcatcccgtgtagggtgagaggggagcccactagctccatttgagttaaatttacatatctaaagaatttcatcataatttgcataaaatggattgccttatgtatagaaataatgaacaacaaaaacaaaattattcgagtatcttactataaccactacattttcttgtacatatgctattttttgaagcatggtttatgactgggacagaaatgaacagctgataaacttatgaactatgtttttaactctattaacaaagagtaaatattttattctttaatgcattataccctcaatgtagatagtggtaaaacattgtgatatagcttgacaaaattcagctgtcttaaaagcaaaattcttatgaagggtacattcagttgtttttacttgcttttttgtgcatgagaatttctactcttaacaagcaggtggggtgcattgtagctaaccaggggtctgcatttattgataatgtacctgggagcagttttaataataatttaaaagtattaaataataatatttaattaatattaaaataataattttaataaattataaataaaatataatttttataaaataaaaataataaaaaagaggaccaaaaagtttgtcaggaatgattgaacacacagtctgtgatgaaaatgatacagtataaatacttatttttaacacagaagctcttccttaaagaactggggaagtaccaagcagtggggtcagggcctggtttcattggtatcctcttcttttcttgctgggcctggcttgaacgaggcttcttggggtctgacctctgtgagcccccaatatggctgtgcatcattggagcacagacgttattgtgaggctctctgcctgtgttccatttagcaaataaacacttcactgtacaggatcaagctgcttcttcacagagggaggatttatcaggaagatgggagttaaacctcttttggctagaaaaggcacttcctgcttggagtgggctctgcaaacagaacccccagtgagctgaattgcagcttccataatacttcctgcgtaacacagctaaacatccctcatgagtgtgactggattatggctttgctgaatagttcctttgagcacatcccttccccacccaataatatgttggttacattcacccatgacaatgctatttggttgggtttcaaagtgtaattccagcaaactcaaacatagtgctgttggcacatggcttctcatgatcatcttcgtaaaacaagttaatcatctgttttcataatacatgtggacctcagtgaggttccattctcaactctaccacaagttaaccggatccttgagcactttccgtcatctctgcaggccttgttttcatgtacaaaataaattaattaaatgatctttaagatcctttctagttcttaacatttcatgattatggaaaaatttaaatttgttcgttgttttttcctagagtgtggacacttacaaggggattccatgaaaatattgtggccctgacacatgcatgcccacatgccatttttctccctaagccataaagtttgttgcctgcactttccttatgtgaagctctgctgaaaagtcttgcctgaatggtggtcatacttccctcattactctttatactctgcaagtgacactttgtgtatactgcagccaccagtgtgacctgccatggcactacaatttgaacatcaatttaaatagattccctttggaagttaaggtagctagataaccataccatccttttctattaaaagcctcaataatgttaaaaatgtaagtgtaggcatacatgcacatgtgtatctggtttggggcagtttttctttgggtttaaaaacatagactttgaagcatagactgggtttgaattcagctcagatacttactgtcagattactgaatctgtctaagccagtttcaccattcaatcccattttatatcaaggattcagcaaaggagcatatatatagcacttaacacagtgtctgtcacaacataggtatttgacgaatggcaggattgcctactacatatctatccccatatttaaatcatctattctaagtagtacatccctttttccatcttttaacatctctgaagttgggatgtattttacaatctatagtgttttacaattgcttattggtgaagtggcagtcatgaggaagttccaggtatcttttaataaaataattttgcttatatttcccttttttgtacatgcgctggaatgatacatgtttaaaaaatctatgtctgaataattctaaaagagctcttttaataagtaaagtaaaaaccaaaagtgatagggaaccattatctttttttagtggtatctaacacaattttgcacctttagatcagtaacatcttagagttgaggatatgtagtatgtcatatgtatttgtgtgtgtacgtatgtatttggtcaaaaaattgattcattgtcaagattttttcccctgagagcccagccacattttcctaaatgttacaataatggacctagttgcaagaatgtaaagttaaaaatgtaaagagaatgttttcaaaatgctatagctgcctaaaccttgcaaaatgaaaaacgagcgcttcttcagcttggaacagtttataaaggaggcaagcatgtgttgtgtgatggttatgctggtgtatttgtgcagatgcatagcacaggctctgagagggtaagacttcatgattaatggtgtttattcttgacagaagcctcctttatttatctgcaatacagtttagcgattttatcaggcacctgaatgaaaaatattcagtcataccaatattgcagtgtaaattgagtagagtcactttttattatatctttctgccttatcatctgcacagtaattttctagcagaggtttgatatggaaaggctggatttagctgtacttgacacaaagcctcttcaatttctcctaaaagttcaggctgctcttagaaatgtgtgtgtgtgtgtgtgtgtgtgtctgtgtgtgtgtataatatataaaccttctctcttatccaagcaatttcaggatttgaaagaataaagataaaatgcacaaacctggatgggagaaatgttgttaatataaaaacatctaatagctgtgaactcactggtaaaagctcctttagtgttgaagcttgtggctcagtactgaaccttttgcaaggctacgtggtcccactttcttctaatcaatcaccatccaaatccagttagcataaagccagaccctatcgtttctcctgggagtagtatcaaagttgaagaccacagtggcccagagaggacataagttgctgcaatgattgtgatgctattctcgagaaaggaaaaagaaaagagttctcatttgtaggatactcaagtgatgggtcactaaattttaaacaaaagtgtattcaagcaacagactttataacatggtcaaagctaagcaatgacagacaggggaatatggtttgaatcatagaaatcactggattttaggaacaaatggggccttaaaccttgtgagtagaatggagatcatctactccaaagcttctcatttgacagatgaaacagtgaggctcaaaaagctgtttttgataagaccatggtcctgtgcacaggttttccaagggtaatatgaacaagtaattcttgcacatcatagacatttccaatcagatgaatctctcctcctttatggtactggaagacttgctttctctctgaagaaggaactgcagaaggagactttgtagctccttgttaagtagccagactcattttcagtcctccatgatgctgttctctacgtcttgagcaaagttcccgaaggccatgataacaagacccctaagaaaagtatccccttatgtagaagttgatgctgcttttctgttgaataatatagacaaattgttccccatcactacatacactctgcagtacactacatatactccttttccatatgtaatttaattttgaaaagttaacaccctccaaggggataaagttctgaaatattgagaagtatgcttaggacataaagccttagtctcatatagtagtcctacaagctctacttccagttacatctaaagagcctgccacttcaaaagggctcacttttttcacctttatgggaccaatggccctagcaaaccttgaagattttattctggaggagagttattgaatcactaatgatagttccttgttggacatctctatataacttaaaataaaggtgattaaaagaatcaggggaagtaggagtgagatgtcaaggttcaagggataactcaaaaaacagactagttagtagttaacagtaataataattatgatgaggatgatgatgatactaatatggaaaaagtctttatactagctagaagatgagactactgttgataaaagattcattctgattcttgaggtagccttactgtcttcttggctcagaattctaggtgcttcctgtctttgttataaatatcctctataacacctgccaccagacccaagattaagcaaggattaaatagttggaacccaacttcctgttttcaattaattatatccacctagtacctgaagtcctctgaggggaaagttcttgcttgaataacagattctgccttagtgctgctgagacttttaaagtagctgtttaccttgaattgttgagatttccatgtaaatgatacaaacatgagctggtttgtttgtaaacagatctaactgagtctcttgtatgtatgttagagtcattttcccttacacttgatgtgtattatggctcagactcaaaagtttctgctaaaggaaatcatgatggataagtttctgcattgttggaaaatgtaacacctatgcaaacaaatgtcacttatcccaggagttttctaggcacagttagttcatcatagagggacttagttgtttgaggagccattctttctacactattgggtgtcaatatttttctattttgccttgtattttcttttggaaaggatattattttgcctatttgagtattgtttttgagatggaattggtaattcatcaaattacagaaaataggattggtagaattaatggaaaatagagaggaaagtcacagaaatcaaactgattaaaaaatttttgttttctctatctctaaagacaaaagtttttattttttttcttcatggcaatgaagttgctgaactaaaactacagaattattatgctcttgaatttactttgaagaaaaaaaatccatcatcttaactaaggtaaatcaaatcgcttaatctatctgttaggagaaaacatgagatgggtgcgcctaagtaatgccgaagtgacatcatagctgaactcacccggccacaaacagctcactccctatcaggtccttgagggaaatcagtactcaacaaggcaacggaagccaggtgactttggccttaaccaacccagagctctaggaatggcagcagcagcaggaatgaaggtgttggttgtaggggccaacatttactgagaatttaccatgtgacagtcaccaggctacatgctttctgtatacttccctgttaaaaaggaaatggtacagtgctgccgcttctctgtctgggcttaagtagctggagagcaaagcaggcttttaaggatctagttcacccaacaggcaaacctaagcccaagaccttgcaactggtgtatagaacagcttactgaatgcacacttccaggtatagggagcaggagagtgagacagaaggaaagactcctttgatcctctgggcctggctggattggcctctgccgtggcctgctccactggaggaaaagggactacccaagggaaaaagcttggctgatcaaaggtaaccacttgttatcttaggggaagaggagaggaaaggacagcatctgtgtgctttcttaatgcagatcagttaggaaactgtctagaaaacagagccccatcagatgtcacagaatccaaccaatgagagcagctctccatcgcccattcaacatggcacctaggtggtaggaaaagaattgcaactggacatatgaatgtctcttttgacagcgacagctgtttcctcatcaaggtggtacttctgtggacattgtaaagatggacatagcatattagttcttctaataatgaattatatttatttttattatattaattaatttataatttgtaattaagaattataaatgaatattatattcatttatacttattaattccactttatatttatataatacatacattatataataaaacattttatataatagttaccggttttatccttcttaccaactctagtaatcaggggaagaagataagaaaatgtctttcatttattagacattgcagaaacaaggatacctttgcatgaactatttggactccatttggaggacaaaaaagtctgctaaaataataatttaatatataatgtgtattcatggaattaaaatatttaaaacatatgttatttaaaaacaagttgtcatctgccatttggttcaggtacgctcttttctccacttctttttctcttctgttcttaattctaaaatgtgagaaacatacattgagctctctttaaacaaaagttagtgggatagaacgcagtcccatgctatgagatgtggtcatttagctctcaagtacttatttgaaccagcagtatgttcattaagatctctttttaataacagtgcattgcatgttatagtggctggaatggactttctttttaattctttgaccttgaaattttaatttattaatgagttatatttacagtacagagtagagacaaatttggcacattgttctttgcagtctttcctggaaggaatgaaatcaattttagctataaacaattgcactgctcttgtacagtgatacttgtataacattgtttcagttgttggaagaacatgactaacatgtatttgtttggcttctctcttcacaagaagctcctttgattggcttagcagtagcccctgccccctccaaagttaatacacagatgtccaccttccatagcttaccttgaatttagactaatgtgtcagctagactatttttgttttatagcagtaaatatgttattatttatgttacctttaaagcatcaatattttgtaagttttgagaaataaaaatgtgtatcaatttgattttctgaatttaattgaaatggttgaaaccactgtgggaaatctcgatgtatttggcatgtatccttttaaaaaattattgatgaataatacagagaaagttgcacaaaatgtacacatgtagctcagtaaatgatgatgaatgatcatggagtgaaaacttctaacttaacagttctagaaatagaacatccccacacctcataagcccttcttccatactctccacccacctgaaagtcaacattatcctgactatcctaacactgaagttgacttttgcctgttaaagaactttatataaatgggatcatacattatattcttttgtgccagttttcttctttttttagttaattttaatttttttctgatgaacttcccattttatttatcacatattttttatttttaaagcttttttattacatattttttatttcaatagcttttggggtacaagtggtttttggttacatggatgaattgtatagtggtgaagtctaagattttagtgcacctgtgacaccagtagtgtacattgtacccaatatgtagtttttttatcctttattcccctccgctgacccctcgccccctgctgcctttcagtctctaaagttcattataccactctgtatgcctttgcatacccatagctcagctcccagttataagtgagaacatatggtatttggttttccattcttgagttacttcacctagaataatggcctctagctccatccgagtagtttcaaaagaaattatttcattatttttatgggtgctgggcttcttctatccatcattatgtttgtgagattttttatgttgtagtttgttcattttcatagctgtttactatttcattgtatgcattatttgtccattctactgttgatagatattaggttgtttccaatttttaagtggatgactaatgctgctatgactctttgagtacatgtggcacatatgcacacgtgattgtctcatatattccaaagaaaaggattgctggaatatatggtaagaatttgtgcaagtacccaatgcctgattgttttccaaagaggtagttctagcttgcgctcatattgagagttcctgttggcctaaatcctcatcaacacttgtcactgtcagacttcttaattttagccactctagtgggtgtttaatgataactcattttggttttaatttgcactgcactataaatgatgtttatggagagttagttaaaagataatagaaaaaccttatcatactaagaaataaagtataattcaaaatacatgatttttatttttaatatgtaagaagtgcataatgcctgagaaaatgctggaagtaattatgttaaaatgttgacattggttagcttggatagagtgaatggctatttcttttcttaaataaccacttgtctttttcattcatggaatattaagtccttttatactcagaataagagactttttttttttttttttgagacggagtttcgctcttattgccctggctggagtgcaatggcgtgatctcagctcaccacaacctccgcctcctgggttcaagcgattctgcagcctcagccttgcaagtagctgggattacaggcatacaccaccatgcccggctaattttttatttatttatttatttatttatttatttttgtatttttagtagagacggggtttctccatgttggtcacactggtctcaaactctccacctcaggtgatccacccgactcagcctcccaaagtgctgggattataggcacgagccactatgcccggccaataaacttatttacaaaaatctcttgaagtaatgtttcatcattaaaacaaatatttcttttcccttctctgtctttaaaaaaatcagccttagcctttaaattctccatgtaagaaaatattcatcaccttagcattaatgcatacgttaagcaatattctagccctcacctttagtggccactttcattcaaatcatatttactttttgtgctggttcattgtccatatttttcatgacccacatgcttttgggagcctcctgtgaatgctttttagctgtgccaccactcattaggtcacatctactcatacacacttcttttgagtgtagccttttgcctcatttgactgtaggctctttcagagaagagaccatgcaaccatgtatcatgctccttgaaatctctcccaagtgcagaaatcatagcggattcttagggaatggattttcaataaaatgttatattagtccattttcatgctgctgataaagacatgcccgagactgggcaatttacaaaagaaagaagtttaatggacttacagttccacgtggctggggaggcctcacaatcatggtggaagatgaaaggcacttctcacatggtggcagacaagaggagagagcccgtgcagggaaactcccctctataaaaccatcagatctcatgagacccattcaacatcaggagaacagacccgcctccatgattcaaccacctcccacatgttccccccaacaacacatgggaattcaagatgagatttgggtagagacacagccaaatgatatcaaatgtatatccaatgaagagatcattgaaatgttcatctgtgtggttatacatgtagtttttaaaaattaaaatccaaatggtaaatttgtaaaaagcatatgccaattaagaattcatggaaaaatatttcatagctacaaagatgatgaaaataggattggaaatggaaccattttatcaactaggggcctgggggctgatggagtgggtatgtacagaggtgtgggtagggttaaggggacaaacaagtaatagtaaagcccctaatacagtcaaagttggaatgaaaaagtgattcagtgagggctggagcagcagaggagggctcgcccaccaggaacagtggccttgggggagcaatgccataccacagagccacagctagcagagagggaggaggggacttgttttcccttcctgccatctcctgccttgcttcccttaagtggaaaccggagggaaggcgagccagctgattcagaccttaaagacgagactccccacacaggctgtggccttggggaggaggaagagcagatggaaagtaaccaccataaccatctgcacctctcagggtcacgtggtgtttctagggcagaggttatctgaaagcttaccttgcatagagggaaaaaaaagtataggattgtgcagatttatgacagtgtctactgttttactcttgaacattttagatatttgttttctttagtgtatggaaaggaagaaaaacatatatgtgtatatatatgtgtatatatacatatatgtgtatatatgtatatatacatatatatgtatacatatatgtgtgtgtatatatatatgtatacatatatgtgtatatgtatataggtatacatatatatatttgaggcaaggtctcactctcttgcccaggctggagtgcagtggtgcactcatggcccactgcagcctcaacctcccaggctcaagtgatcctcctgcctcagcctcccgagtagctgggactgggactgtaggagtgtgccaccatgccagtctaatttttttatttttatttttctagagatgaggtctccccatgttgctcagattgatcttgaactcctaggcttgagtgatccttctgcttcagcctcccaaagtgctgatattaaaggcaggagccactgcactgggacaaaagcaaattttttcttacaaattttgatttattaaaatggtatttattgaataattaattaattggttaaaaatgcattaaaaagaacaactaccctctgttctctatcagaccactgcttgaatatgaagaaggatgtctacttgttatatttaaaaaaacaaaaaataagcttatgtaaaaaaccaacatatttcagtcttccagtagttggagcagtcatgcagagatgcaggagatatgtgtacatttccagtatcccaagcaatgtgcgagcaaattgtaataatctggcatgtaaaccttgtttaatgctctcataatgggtaatgcaagtgattaaatactgtgattttaatcttggcattttagtaacctagtaagatagatgaaaaggcagtaatgaattagattatataataatatttcattctaactcagaagtccagttattctctgcaacatgttttaagtttctcatggtgtactgttaaaaatgctctgataagaatcttctactctttcattgtaatctattttcatgaccatataaaaaatattctgaaatcaagttacctacaccaacaaacagtttccactgggcaatacggaaacaaaatgccagtgactcattaggtctccaatgtcttggaagacagaggggtagaaacagcataaagggccttatccctgagaggacacagaggcattgcatacaggagccaagacacagggataatggggcgaggcacatcttcccagctgtgccctgtagtcccaacaacactctacagtttgggaatctctggtgcccagacagcagtttgtcagatttagtttggagggccacaggcatatttctatactcttttgctgcaacataaatagcatggaatgtctgttcttggaccagttctgaatttcagtgtttttctcagaatgtttgtttgttgttctttcctccctggtttgtgtctccctccaatgactgagccacagacagtcccaggacagagagaaggtggactgccacaaagaccgaaagcggtgatcctcagttcatttctgtgtgtatctactaaaaatgtgcatcaagcagacaccacagtttttttcctggcactacttttaatcttcaaatgaagatttttaacaagctcgacaaatatttaccaggccaagttgatgatagtttgtaggaaaatatatgtcatttctatgggaaattttgtggccgccttctccatacctcccctgtcctcttccttcagtggaattcagccctcctctggtcataatcctgagtgcccctcacatagcagtgaacacacgtctgcctgataaatttaaggagcttaaccttctctcccagatttgctttccagttaaaaacacaataattgggccgggagccatggctcacgcctgtaatcccagcactttgggaggccgaggcgggcggatcatctgagatcaggagttcaagactggcctaatcaacatggtgaaaccttgtctctactaaaaagacaaaaacttagctgggcatggtggcacatgcctgtaatcccagctactcgggaggctgagacaggagaatcgcttgaaccctggagggcggaggttgcagtgagccgagattgcgccactgcactccagcccgggcaacaagagtgaaactctgtctcgaaaacaaaaaacaaagccacaataactgacaaatgatctagctgccaagaatttgaagatggctccgttaggtaaggttaaaaacacctttatttaaagactatttacatgtcaggaggctgtttggctatggtagttgaagtttggatgctcagctttgtttgcttagaaactcatttttgtcacactttagcattagagaaatatgctaacccagttcacgagagcctaatgtggaaacaattaataagtgaccacattttaatgagaaactgaataccagccactgctccgctagggaacaaatcgccatttggacttttttttttctgagtttagaatcagaagaaaagaagtgttgttggctggttctacaagaatatcaacaaccacagcacttaggcactgtgttcctacctttacacacaggatttcagccctcacggcagctcctggagggagctgtgattgttccaattttgtgtataaggaaactgatgcttgagtgagggaataagtgaagaaaccttcaaatcccattccttcaaagcccttgcatttaattactgacttcattttcttaaccacctcatgtgactttatgattttactaagggaggtcctggaaaatccaaggaggtgcctccaaggtgctgtcagggagaggagcaaagccgactggtgtgatcagatttgctatggaaaggggattcttccacacaaaaaacctggacacagatgtttatagcagctttattcataattgccaaaacttcgaaataaccaagttttccttcagtaagtgaaagagtaaataagctattccatacaatggaatattattcagtgctaaaaggaaatgaactttgaaaaaatatggaggaaacttaaatgcatattacgaagtaaaagaggccaatctggaaagtctacatactgcctgacattctggaaaaggcaaaactatggcgagggcaaaaagatgagtggtttcctggggttgggggctgggagaaggaagaagggaagaattggtgaaagaggatttttaaggcagtgagactgctctgtatgatactgtaacggtagatacatttgcccaaacccgtagaaaggataacaccaagagtgaaccctaaactatggactttgggtgacgatgatgtgtgagtgtaggctcatcactcgtaacaaatgcaccactctggtagaagatgttgataatgacaggaggctatttatatgtagaggctgggggtgggggttatatgggaaatctctgtactacagctcaattttgctatgaatttaaattgctctaaacaaagtctgctaacaaaaagaatgtcttaatatttcaatatttgaaatcacacagtatgttgcatttgctacccctactatgcatgtatatatgtttatatgtgtgcatatatctgtgtacatatacacatgtgtatataaatatgtttgtgtatatgtgtattatgggtggaatatgttagcacagtatgtgatgtatatgtcacatatgattttacatatggatgtatgtgtatatttgtatatatgtgtgtgtgtgtatgtgttgagcattcagtatatactaggctcagtacatgagactttactcttgtcaacttcctaagactcccacgaggttatcttccccattggacctttaaggaagaggagaaggtgagtatcaaggctgaggtccacgcacattgagtcccactgcttggatacatctgtatctagaattcctgatgacccccttatgactgcctgatgcacctgtatctttatcttcaaatcctggaggaaccctcctttccactgttgcttctcagcagtatgtaaaaggaccgtagagcccagtgctcctgccagagaagatatgaccaggtcttggagcctcactcgtgggaagctggtttagtaggtaccttcagtgtcctggtgggaaaggcttgaatccaagtgaagcagtgacagggacatcagacttgatagacttttgtgaggagaaaacagcttcctaggctttctttgggattgatgaccaccctagcctggccgctataatttttgtgtttttctagatgctgattggttttcctgtgcataattctccaaaatagaatttggacctctagggatattcttaccactcttctcaactctggaattttggagaaataataggtttcaatctttgggtaaatcaagaaaagccagtaagaaatgtcactgcccaccctgatgtttagttcatgttgctcagaccaagttattcctggattgcaaaagctggcccaggaggcgtcatctcatggctttcttgaaacagctcttctgcattcggtggcaccagtccctcagtggaaatctataaacaagtctgtgtttagaatcagattggaaggattgcttgtcctttcttgtgaagaataaatgaatgaattagagcatcccctgtaccttctaaggtagcaaacacatctaaatacggtgtaagatttaaccaatggcggacacgtctaaatggagcttaggggctgagttaacaaagaacagaaagccaacttgttttgtagtaaagagctaaaataggaaagactaataggttatgttgatttctatttaaacaagccattttactaatttctgattgggtgtgaaagcctcaagctgttttgaaaagaaatagctatttgctggtggtgatttcttactcttcccatgtgtaaatttagaaaactttggatttttattttgctttcccaaagtagcatctaagtaacaaataaaaagcctcattttttttttagttcaaaatgaaaaaagagtcagaaggagaaagtgagaaaatccacccccaccaccatatttcaacttctttcattttctactgagagaaaattcattatctgatctctgatttcatttatttcagtgtctgcgctgtgcacttagtggagctggcttttaccaagattatattctgacagggtgatgggggccgggctgtgcgtgagcatttgctttgcaaggagaaaatgtgtttccccctccctttcatttcactcctaaagccagtggtggaagaggaatttgctgttctcagttgatctctctctatcagggcctccccttcctatggccgcaccctctgtgaatgaggaaaagcggggagcacaactgtttaacctgtcagagccagttccctgattatccatgccaaatgttttccgttagagaaggaacttggtggtccaggaggttatgcagactggccattctagaagtggctgtctcagggtgtggctgtggctatggggcagcaggtgtgaggggattttgaggaatctctctccagaagcagatcaggatatcgtggtagcaaggtgtgttttagaatttatttttattaaccaaaagcctacattctaccttagctcattataaccgacgcaagggcttgattgaaaatgcattcttccccaactttctaacccgggagcacttagttgctactgctcactgaacgtggctcatcgggatgcctcatggaaaagggcttgagcagaaagctgattccaggtgctgctgcacaaaggggaggagttgccttccaagcactcacacctggatccataaaagtcattttacttaccactgcgaggccctgggaagttaaacagacatgtgcctggatctttagagtgaccgatttcccatttctaagcagacttttgcaatgggtcttcttccttacggacagctctgccatgtgcatgatcaggcttccagaccagacaaatttgggattgtattctttcattctgttctgttctgttcttttctttccctttcttttttcttttcttttctttcttatttttatgcaacaccatgctagtaagaggtaagttttaaatggtaacattaatatttgggtcaagtggaaaatacaattgtagcaaccactttaagcccagttgcctgttatttagaatttcttctcatggaagaagccataggttgacctttattttactattttggagtgcaatgaagtttctcagagatcaatttattttcccaaacaattgcatagcgatgctctgcctgcattatatcatgctgattttaaaataatagtactaatatgtatttgcctgcagttttttccacaaggctcctttgaattcacttaaaatcttacttattttctttcagagacagcctctgcctgtggagatatttgtctcatgcataccccttgtatctggttttctttgtacccaggacttccgccttatctagtagccctacgtatccggacctgcccttcattaggatctccccacaccggaaccccgctgctgcttccgagtctcccttcagccctccacatccctacattaatccctacatggactatatccgctccttgcacagcagcccatcgctctccatgatctcagcaacccgtgggctgagccctacagatggtaagtccaggatggattctgcttctggagatcatgcagcctcctccccgctcctcactcgggacgtgtataaagtagacctgatgtttagtgagtgtttcccatgtgccaggcgctgtgctccgtgccttacatgcatgattgcgtttcagttttgtaacacctcattggcagtggtgttattatctccattttcatgtcagaatagcagcgtgcagtggggtttacttgcaacgcagtcaatcccatggctagtaaggggcagaggtggaattcattgaaaatgtttctgattcccaaatccctgctggtaactagggttctgttctgctgcttcacatatgattagactggtcctgtagccattcacacacgtgcatgtgtaacatgagtgttttactcaccttctgatgaacacttttctgttctgtgtgtctgagcacatttatacagatgcgtctgttagaggagggcttcccaaactctagtgtgtctatgaatcacctggggagcctgataaaaggcgattctgcatcaggtgggatcaggtggggcctgagattctgtgctcctcaaaagccgatgatgtcagtgctgttggtgcctggaccacactctgagtggcaaggtcttagaaaacatcatggtccagggctgttgcctgtgctttctattcttgaccatgccacatgaaaatccgaagaagtatgtactgggaaaggaaatgagcttagactttcttatacttgttgctcattttaggctcttaaggatcgaattcctgttggttctgttagtccccccattactttccacatgactcttcttaattggagctgtgtattctcctggtgtcaacttataaactggtcctttgattcaggaaaagtattttccatatcacgcacacataggaattcacttgcccaataatcactggaatctgaatcaaggtccagaattgcatcacctattaattacaggtagcaggctctgaattctttgcaagagatcgcaaatcaccactgcctgttccacatcagagaaacaccaggcatttcatttcactgagcagtgcttgatgcgacttccatgccctatccacattctctaggtagacgccttcctgaggctgggtgtgcatggtgagaagctgcatgaagtgtctcaggaaacatccactcacttgggttttcagaaatagctttccttcagtaacagccacttttttcttttttgattcagtgcattgaatttactggttaataatagtaatacaggtagctaaagaataagttttgccctttgggcaggattaacattttattttattttgagaaagggtctcactttgttccccaggctggagtgccttggtgcaatctcagctcactgtaccccagacctgctgggttcaagtcatcttcctgtctcagccccctaagtagctgggaccactggtgtgcaccaccacgcctagctaatttttatattttttgtagagacagcgtttcgccatgttgcccatgctggtctcaaactcctgagctcaagcgatctacccacctctacctcccaaagtgctgggattacaggcatgagccactgtgcctggccaagattcacattttaaaaataaaaatcaaatatgaattagattttctgcttcagattttattttgcacttgaagaactggagaatcatctccttcaagtccttgggagttggtggaaatgactaacaaggagaatagactgagggagagagggaggctagctgacaatggacttggaattatgcctggcctgcagaaatttattcgggctagtggaaagtcataccacgagttaaactactgaaagcactcttatcatctgctttgtgtagcatttgatgacgagtatatatatcacattctttgactggttcatttgccttccttttcttgcctctcaagaatccagttaatataatcaaataaagtaacatgataaatatttcccttgtggcctaaagtttttttccttaaatctcagtctttaccatgtatcatggataaaaagtatatgaaacaaatataaaatacccacaaacctatcactagagtgctggtatttctagataataatcgtaaaacttttattgattgaatgctatgtgctaagtgtgctacatacataatttaatttttgctcctgacgacctcatggagccagtttaaatccagatctctatgagtctggaggccaccctcagaactgctacaatgtcttgctgcttttgcacgaaaattggcaggtggaaaccgactattatcctgttagaaagctgagtcttggcagtaaattgctccagattgataggtatattttctttttgattttgtaatgaagaaaaggaaaagagagcttttaaattatggaatgtaaaattgtagcttatcattcagttgtgttattaaagctgtgctgccttttttcatactggtaaaccctgacttttcatgtgagtgagagttaactcagacactcttgtcagaaagcttagaaaagtattttaagtatgtctggaaagatatcatagtcttctaagttgtctactattgtaagaaatgcaaacatacagtgatttgatataaaaatgattttatttggggggcaaatgtggttatgtacatatatacattttaatcattctgatttgttgataatttcttagaccaacaacaaaaacttagtaatgcatttcacttttttctattcctttccttcagttttattttcaaataaaagatgtttcatggaagtaagagcacaatttgagttaaaggagctttactctaataagccataaaaggaattgctgatgtgggttgtgtaatggactctgagatgcctcaagagaaacttctagttgaccttctttcgctagtaaccatacatctcttgtctcctcctagcgccccatgcaggagtcagcccagcagaatactatcatcagatggccctgctaactggccagcgcagcccctatgcagacattattccctcagctgccaccgccggcacgggggccatccacatggaatatcttcatgctatggatagtaagtgacggggctggtttctagagtcttgggaaatggcaaaggcaactttatgaaacagagaagaagatacaaagattaggtgattgtgtaactttttgatctggaggagaaagtggaaccaccactatctggtgctctggttcccttcgtcttctagaagcttccacagatttggacatcctgagaccccctgtttagctcaaggataccagtgaactgacagatgcaggcaattgtaattgacagcgatacataaatattagctggttaaaaaaaatcccagcccaggtgacatagcgagatctatctctacaaaaaattaaaaattagctgggtgtagtggcatgtacctgtagtccctgctactcaggaggctgaggctgaaggatcacttgagcccaggaggtcggtgttgcagtgagtcttggtcacgccactgcactccagcctgggtgacagagtgagaccctgtctccccaaaccaaaaaaattttttcctgtcgtgattgtcttgataacaaaataagggggaatggatttgatatatggatggactttgcctccccactccttggtttcatggattttatgctttaaaaattaattttaaaaaatacctgttttaacaggttttacatttttgccttaaatgattgtttgccccatatgttttctttacattaaaaaaattgtattccactaagacagtttgtagctgctgaatatatgaaaggatcagaatagttatcaagttatcaatagttgccaaatagcttatttggaaaaaataaaaactttttccaaatcagaagggactacttttagtacctagcagtggaataaggtgagattacttgatgcatgttgtatcacttattttggggtcccttaggtgtgtaatgatttttgtgggtcacttatgtagacgcatagacaagtaagcctataattacctctcatcagagcattccagagcgctcatctcttcagatcctttaaggacacatccgtttgcaaggcgctctgaagtgatcctaaagcatcatccaagtcatacatcagcaaaagccactacctttgaataggacaacagtatgactttgagtagggcctttgcttagcgttttgtttgtttttcctagtagcagcaattaacttacacttttccatttacaatctatttggattcttctgtgacagaggacgagcatatgtcctctagttatttagtcctgagtctcggactagaaagaaggtgattatttcatacaggggtaaaaactctacagccttagtctgcttaccatcaagagctacctttgtgtgtttcattggaacacaagattctgttggtttccactgggaagctcattactacatggaaagtaaaagaaatgtgttacgtcttcttcaggcgttctgttgtttggctttttagcatagagagcttacatttcagattcatcataaccacatttcaattagcgattgttgaaaaaaaagttgtgttattatgcaaatcagttatttaaaatctgcaaataaagaattaaaataagagagaatccttggaaggtcagcccgcattactttccctatttgatgagaatgtgtttagtcaggcagtggcggtttttatctaaataaaggatgaagctacccttttactttgtaaaaactaattaaaggaattttaatttgcctgagtatatggtaaattgattgtcattaagtaggaatttagatgtcctatcattcatcacataaaaataaacctcttttttctttgtcagaatttcttattagaatagggaaacaaaataattaacagaaagccagatcggagatatctgtgttagaacaataagaattctctggcttatatttaagaaggaagtggtatgatcagtgaagaactgggctacttctcttttggctgttctgaaaatgcttaccttgtattttagcagctcccttcaacagagtatcccaaatcactgtccccaaatgctgactttctcttcttttgcttgtttattaaggagttgggaagaacatattaaagggctggaaagttcttaaggcactatattcttttcctctaaagtaattgaagtagcatttattaatagttatttagttagaatataagaagattgcccagaaatttccaccataggagattttttccaacaaagaagcgaaacattaatcctaaatttttatagtggttgtccatctgcagtggtagatcgaaacctgggatctatctggtcactcttcatcccttgttacagatatttaggacttcttaattaacacaaccctcaataaactgggttcaggtaagcacctgacttttaaatagtgggcacgtctaggtttcagcaagatgtaggacagagtgtttatatgtagcttgttaggataaactagtctgtttatggtcccaattctacctctcagtgttggagtgaccttaaaagatgagaacaaatactccctataaggaacattctagagatgagggcccctgaagaccactatttatattggtggaaatagacttaaataagagccagtcttggagggaaaaacacagagaggaaaggttccagccaggctatgagcaagccaaagggtttcatggaaagggtgaaaaggtcttgagaggcccctcaccctctttggaggatgtgagagtgatctaaggctcctagggtttgagagcatcaaatgggcttcttccttttgcatcacaattagtgatctaaaacattagagattttctagggatatatccacgtcctgtctagcatgtgctgtcacttctaactttgccagtgatcactgagtaccattgagaagggcaattattgtccaggattatatggaagttgataacaaatctggtttgtcacttggaagtgacatgtatttcctcattgaaaaacttccatgatgaaattagcctctcatggtgagtaaatgtgaaggagttgtgtttaataaggcagatgccattataaaagtaagatgctgatttaaatgccttaaaaatatgcacaggtgggcgcagtggctcacccctgtaatcccagcactttgggaggccgagactggcggatcacaaggtcaagagatcgagaccatcctggccaacacagtgaaacccccgtctctgctaaaaataaaaaaaaattatccgggcgtggtggtgtgtgtctgtagtcccagctactcgggaggctaaggcagaagaatcgcttgaactcgggagacagagttgcagtgagccgagatcgtgccactgcactccagcctggcaacagagcaagaccacatctcaaaaaaaaaaaaaaaaaaaggaaatcgttgggattgctattttgtgctaacatgctctaaatcaggctggtaatgaaactattctaaatgaaggaactcgttttagttgtgcctgaaagaaaaatttgagtaggtaccacatttatcattcaagttggtttttaagttttatacgtggatggcactaacttagtaaatttcagtttgtggattttttttcattatttctatagtattgacaatgaagtcattcatatttatctatcccatttaattaaatgatctctaagcatgttggattgttatcttgtatcaagaaccatctttattgaataaaatattcccaaagaattttctggagaccaagagcctggacatttttttttaaataaagaaagattacctgctacttcagttgttctgggtaccgcaaaattgccattttcctataaactggtatactcattctatgaggtgttagaaactcttcattttacttaaaactaatcatgttttgtttgcctcctacctggtgagattatgttctcattcgttcattaaactttagtttgatgactctgtaatgtaaatatgaccttcaaaaaggcagaatggacctgtgggccacattcatctctgtgtcttgaagctcacatctctaatatctaccaaatttgaatgcaaattggcatttaattttgaactcttcaggaagaaaccattgtattaagttggcatgcatttaagtttgagttactcacctccggatttggactccaggttaagactccatcagtggaatcttcttgaaggttaaaaattctaataaatttattaccccttattgggtctgactagagaaacaaggtccagagaagagctaaaatgccctataggttcattgtacctcgttatcatgctcgtaagggtttctcctctgccttggaaaatctgtaaacaagcaacatccccaccttttaaatgtttcttgggatttatcctcttatatggggaatgtaaggcagaggtcctcaacctcggtgacatttgggccagataattctttattgtggggagggtgaccctgaacattatagggtgttctgcagcattcttagactctaccctctagattccagtagcatctgctgagtcccgaaaaccagaatgtcttcagatgttgtcaggtgtcccttggggggcaaaattgctctcagttgagaagcactgattcagggtaattatgtagaagttgttttagtaatgctttaagtataccatagagcaggtaactctagaaatcactgggcactgagggcataactgagctgaatttttaatcttaggatactttaattcatttccttcctttggctcatgacttaaaatggtgtgtgttggggtggggagggtggtatgttgccattgtgggaaccactgtctttgtcgcttgtggtgaattaatgatgggaatatctaagcagccgtcagattcataaatcaccagaaatgaaagggataacacataaaaatctctcccttttgtttagcaatttatcattttccctgcacattaataaacagagctcccccgaggtaagcccctggaagacaaatatttctccctagtttcctcaactgtagctagtagatcacatgggggaggagaggtgcttgtcaccgcaagttgccagcttcttatccttcacttcttccacgtaggcaagtagcaataaatagctggtatagagtccaactgcaggtaattaggttcttttttgtttatataacaggcaccagattctccagccccaggctgtcagccaggccgagccgaaaacgtacactgtccatatcaccactctccgatcatagctttgaccttcagaccatgataaggacgtctcccaactccttggtcacgattctcaataattcccgtagcagctcttcagcaagtggctcctatggtcacttatctgcaagtgcaatcaggtatgtattttcctgaatccattatgtgttttttaaatgtaatgtcagcacttgtttgcacctgtagtgatgcattttcagtaccaactgcctatgaggaagaataaaagtgcatgatgctgtgcctataccaagaggcaggtcaaatatcacaatgaattgcaaaaccagttattgggccccagattattttgtgtttgcagacattagtcaatagcccctatatagaaatagcagttattgagttatgatgaaatccacttcgtagagacagtaagtagggcaaatctttttatccagccttttccttgtaataatgttctctagaggaaaactgacttcatacctggttgtatgacacatgtacagaacatgaacaaaaataaaaagaccagtcatggcagaagtcttgtcctacaactctgaagagaaaggagtccatgggagggagagagaaacagcaggacttttcgtctgatggaaaataagtgcagatgacattggaaagcatagatatcagaggaaatctggcaaaagaatatttctttgtttttccattaagtatttttagcttaatctgaaagatccctattttgaccatacacctttgttaaccgtggatagttccttgcttgacagaaagtgttttgacacttccttccatgaagcacctcatgtctgtttttgcacgtgaaggtacaagcacagacttttgtaaacatgattaacataaaatatttcttactgctaatgatcaacttggactgatgtcagtaagtagggaataaaagtaagccaacatatgaattttaggtgaattacctgatcatttattgtttgaactaagccagctcacaaatggttgagacatagaattagatagtactctaattaattaatttagcaatcctggttataaactttaaactctcatttcccctaaattttttgccaataatttaagaattcagttactagcaatctttttgaattgtagttttgttaattgtgaataattccttgcttgaaaagtacatactaacggatgttttcactagcctttgttttaataagtgaggttttgtttgtttctatgaatgagcggtagcgttagttgttcattgataggtcttccatggtagattacaattagggaaacttcatcagttcagaaaaaaaagtgtttgcagtagcaagatacccacatttagtaaaaataatgaatactgttgtctttccctaatgttctccattacagttttaattcttgttcaattatcagcaatgttcttcagtaggcaagttaatatttaaatgtggtaaatcctaattttaatatgatgtcattttccgctgcttttctttgttcttttcatatggtcactgaagtgtggaaacgtggatagctgcaagcaactgtgatagcagtcagtgcacagggaggggtcctggggcactttccagattaaccactgtagttacaaatataggctttagagttggatatgtctatggtcagattccagctttgccaccaaccagctatacaaacctaacttacctctcagctctttgaagtttagtcttcacatctgtaaactacagataagacaccctctatacaggaagaatgcacattttactaaagctggtgtggatctgcaatggcaggatgagattcctacctggggtgaagtttcagggggagctgagctgggatggttcatccaggagaggagccatcctgtgatggctgtctatgctacactgctctccatcccagtctggccccgaggaagcatgccagtctcagaaccctggcctggctgctcctgcactcctggcgaatattcctgggtcatagactgacatggactggaggcgactttactgcaattgtgcaattattacatggcatgactaaagtcatagcatccaagtagcagaaatgtggcacacagtgatagtcagaaagataacacacaaaatcacttcatgaacattcacttctcttgtttctctttactttttctttcctcttgctctctgcccaggtctcttgactttttacagcatctaaaggacatagattagaatatggtatagaaatggtcatgatgctatctttatttattcctaccccagcctccttagtccttacggtctcctggtctcctcatcttcacccaggtaagctagtgacagtacttaacagactgtcaatctgctgacttgaaatcatcattgcccatttcgtctccaaggagctataccacaactctttatatcattagagatggaagaagagattcacttaaagaccagtcaggtccttggaggctgtgacagttgggtgcctgggcccattgtgtcctcattttctttcttgcctttgagactttcgattgcatcttttctctctcagtgcaatctctccttctttagtacacatttgctgtattttaggactatatgtctattcttacacagagcaggtaatgcagataacccaagatgagatcagcttcccatataatgatgataataattgttatcattggcaccacttgccagttctttagctggaggagtgctagtgccttgcttactcctgctgtaagtttcattttctgagatctaaaaactgacttcaggaataatcagttagtggtagcaccagaggatctgggaaaggaaagaagcaaggagacatctagaaaaggtaactaactttctcaacagcaaaaggtacaggagagaaagtcgacttcaggtgcgtttagcctctgcgacatgctgactaacagggcaggtgcacggctcatgctcactcaccgttctcacgtcacagctatttggcaaagcaagtggtgttattattattattatttttttttgagacagagtttcactcttttgcccaggctggagtgaagtggcacgatctcggctcactgtaacctctgcctgccaggttcaagcgattcttctgcctcagcctcccgatagctgggattatagtggcccaccactgtgcccagctaatttttgtatttttagtagagactgggtttcaccatgttggccagcctggtctcgaactcctgaactcaggcaacccacccgccttggcatcccaaagtgttaagattacaggtgtgagccaccacacctggccttattcttgttttacacataagcccagtgggtctttgcaagatgaagttagcaaagttccgtgcctggtgggcatcagcactagcactccagtttcctgcttgttaatttactctaaacacacttgactttcacacttacatgttttctaatacctaatttgctgttggtattggcagtgcatcagtaatgatgtttacatttctaaacatgtcattaaatgtttaaagatactcattcagtttctaagaaatgccatagctgtctccttcacatctatgccctagtgcaaatgtggttaaagacgcctgtaatagcatttaccactatttgacgtttccatattttctttctcctttagtagtctgctatccatttctctccaatagaacacaagcaccaaaaagccaatcactgtgtacctcttgtttcaacccctgtgacacctgcattctctcatattgatgccattcagtaaatatttcttgagtaaataaattaaggagctctctcatgagtaattagaattctcatcatccccttattaaagtaagtttctacatggtggatgaataattctggctttctgaaagttgcaatctgtatgagtgttatattattacatggccagagattgatagatacagagccagaggggtgaatagaaaataaaggattaaaaaagcaaatgtctattttaagtttgtgtgtggttcttttgtttatatatttacttaataatccagactactataaaaataccatataaaactaatatttattcacaaaagcccattgacatattataacagtacttgattatgtcagattttttaaaatgcattgtctagacgtacctgacaagtcttttaaaatctcataattaaatagctttcaaaaataactccatgcacattggaaagtatgttataaaatattgcatgtttcaagaagttgtggcttctccatcacctggaagactccccatctaagactagataatttatatttatcaaatacagccagtaacccccactctacatagttaaggctaacgttgtaaatagccagtgaatcacagtaggttaaaatagtgtacctttgctaaaaccttctctctaggaaattgggccaccactggaagagaaggtgtttaaaatgacccccttcttctgtagtcttccggcaaatgtaaatgggatgaagaaatgagtactctacgcatttctaacccactgggtatcactttctcactttctatttaatggctacaatgaaagtggttttatattcttagtggttttaattctggtgtgaccaggaaagagatctcagtgaaaatgacattcccattttgcacatcacccctctgagtgccaagatctccagcgtcacaaaacagtgcaatgtttttctgttgccaacactgatgagctcagcctgatgatgagagggcaagttgtgctttctgtttcgtggatcatcagccctgtctgacactaggaccctggagtaagggtgcatctggcaggtccactgatgctgcctgaggcagggtggaagtcagctcggcctccatagctccttggctctgtgcttagtaaacaccttgcttatgtcagagaaataacacacaaatgaattgagaaacatactgacaaacagataaataagtgccaaattaccgacgtctttaaaattctcattctgtcttctaaaaatttggagatgacattcccttccccgattttcagtaaagtagttaatactaccttaaaaagatagctctcatttacttccttaaaagtaattaatattacctgaagtggtagttagttttatatagtatttcatttaatcagttattaattccccaaatatttagctgagcttaactctgtgctagtcgctgtactgggggaatgggggctacacaaatgcctgagagagacacgacccccaccttcatggaacttacagaagggaaaagcctctaagcatattaataaacgaatgaatgagcaaaagagctagtgagggaacaaatgaatgaacaaaggagcaaaggagctggtaagggttctggtcagtgctgtaaaggaaatgacccagatgttaagaaagaatagcaccacgggcctaattcagcggattggccattgacttataggatgatgacaagataccctggaaagctttctacaagtttctaagaaggaggccaagcaggtgaaggccctgaggtgggaggagtaaggcattgggggaactgtcagcagatgacagttaaacacggggcaggttagccaaagcacaaggttggcgacacaggcagggtccaagttataccacagcatcttggaccacatatctaaggacaataggaagggcctaagatctggggccttagatctggaagagcagaaatctaagggccttccctggaggccccccacaaggctgtttaattttacagataaggaaactgatgttaagagaggttagcagactgaatcaaaggcactcagttactcacatggcagaaccacaaattcaacctggtgggtcgaactctgagtgttcaccagacacacttctttctctcttagaaatcctcaaatgagaggcatggtgaaaagcattggcgggaaatgctatttataatagaaataataatacctgatgatattttgaagaaacggattatgcatatattaacatgatttttctaaccacatctaacatacctgatgagccagatctcatgtaagagtgtgttattgccattcacgttcattgaggtcatatctatttggctgcttaatggcaagtagctttttagctttttagatcagtttcataatgtaaaacctaatgtatttttctccaaagcattattcagagagcatatgcctaaatgtaaatgttgagatacttaagagcatgtgggtctttgtgtactctacttctgaggctgggctgggtttccaataaacttgccctggaaacttttatagatggaagtggaagctttatttttttccctctcaaatagaagcacatgtgtgcatgtgtgtccctacacatatacaagtaatgatagctgttggcccattctctgcaaaactggaaaaaaaaaatggttctttggatggcagctgttgtgcagtgaattccacagctgtaaccagagtgaggatgacctcttagtgcaacagtcacaaagtagccaggaagtttggcttggctttgaatgtgtctctctcccctctcttttcttgaagtcagtttctcacattctggtaccatgtcatctcagtggttcctgttgcctgactttacttccaatcttgatttcatgagcaaaagagttaggagaggtgggatactcattggattcttcttcggcctgtagtaaactaggtttgttgtagcatgaagtttcttaattccagtgccctgacctaaaggaatacatcctgatactatcacatgagtttcttttaaggatgttgaaaaaattcaaacctgaatgaaatttaacaaccaaagcaattggaagaagtgttttataggtggcgggtagacagagttgattttacatttacaagacatttcccaagaatccagaagtgccacatattcattactcttcacattggactgagagctggcgcctttgtgatggagtgtgattaccactcacgccagggcttgcctgtggcttagttctctaatgcatcacctacctgcccagctctgtgcacaccgcgctgggtcattgagagatttcagagatgaacctggaaactgaagagccttcctttctgctcagcttcctacatcctcctgtgccctttccccacatatatcgtgtgctggtgcagaaaccctggcactgtgattacatgggagtgagatattccatggcaactctaggaaaagctgttatgttagggaagggttaagaatgttctgtggattgaaatcatcaaacaataaaatagtagcttttacctttaagtgtgtggtggctggatgatacggcctcttgacatttttcgtactttcctctattgttttctttatttttatataaaaacaaatttcttgaatattgtaatcagctcttacttaccattccaatttaaagggctacagcaagccatattatgctgctttatttatagtaccattgttaaggaatccagtatatccccagcgctctgaccctcctgccttatatagaattcctgaagcatttaaaaaacataggcttttctcatatactgttttaattgggttttatccatttgatttgaatattaatgactttgaagtgcctatatgtatagtagggtaaataaatgtttaatgattgattttctacaatatgaactctgtgtttccattttatatattattttgggaataaatataaattgtattagcagaatggatcacaagggtttctgtacaaatgttgacttacatcacttccttggtgtgaaaaaaataaatatttattgtgaaagccaaacatgattatgtatttccaggtttaatgtattaattataaattatatgtaactttctggttacaaataattttttttttctttggcaatataaatgggatttgtataaagtactcagttaaaacttgctgaattaatgaatgagatgcagtgtgtagactttaggacatttattttggttgcttagcagttttccttttacctgtactctgtttagccctgttgggtatagtttttgagattcccagaagggagacttccatgtaagtgaggtgttactgtgctgtttactgtaatgctaagaaacaagaaccagtttgcaaactttgatcacactttttaagagtattgacaaaactttatatgtctgatttctgatgtatatctacatcagaactttcttaaagattcagactttgataattttattttgaagtcttcgtaaaatagaaaaaatggttcccagtcagacaacggtttgttaatcacttttaactgagctcagagctgaatatggagatgaaactgactgagaaattatccttatttagaccctgcatccagtggaatgccctttcaaactaacaatccagtgaccatacacctgctctggttagtaagctatctaacaaccacatttttctccttgtctgctcttcagtaaaataaagggcaaattaacttttaaattaatttattctggctttataattgttgccctagaagaatgtttctcaaagtgtattgtgaggaacactggtctctggaagctcctccacatcctgctgccacctgtatctggggtggacattaggaatgcacagagaaacaggcctgggctgtattcctaagagtttgatgaccttggtacttctttctctttctctccattacacttactcacctcaggaggcctctgactgtgttagcacgttgcttgggaagatctgggccatctaacactttctttctactgatcttattgactaaatatagattaacagttacaggtcacatttttataaatgtttgttgttattgtcttaaattaccccatctttcatatagttatttagaaacaaaagctataaaagtaattttagaaataataacagattaattgttgaatgcagagaattcagaatcagaatgtaaaattaatttctggtgactcattggaaagagtggggtgaacagaaacatggaggctatgaggatgggaagcacaggtaccaaggtttagactgtagattatgtcctgctctagagaaggtataagagattattaacaatttcaactatgggctgggtgtggtggctcatgcctgtaatcccagcaccttgggaggccgaggcggccggatcacttgaggtcaggagttcaagactagcctggccaacatggtgaaaccccatctctactaaaaatacaaaaattagctgggcatggtggtgcatgcctgtaatcccagctgcttgggaggctgaggcaggagaatcgcttgaacctgggaggcggaggtttcagtgagctgagatcgtgccactgcactccagcctgggagacagaacgagtctccatctcaaaaaaaaaacaagaaacaaaaaaacaaaaaaaaaaaaacaaatcaacaatagtaataatttctatttgtaggaaattgtggcatgaatacatgaactatttaggaaggttcttattcagggcccctaaaaatagaatttaccttctgtttttaattctgatatctttaatcagcaaagtctgtcctgtgccattgaagtgctgcagaaagaaatggatgtagacactagcttcgtttgtgtaatactgctttacagacatgttgtcaaattgtagttttcagaggaaaacatagttttctttgaggtgactcttttgagtgtggtaggcaggataacggccccaaagatgtccacatcctaatccccaggacctgtgaataggttaccttccatgccagaacgacttttgcaggtgtgattaagctaaggatcttgagatgagaagatgatcctcgattatccgggtggcagtgatgtaatcacagggtcccctgtgagagggaagcaggagaggcaagttagggtcagaggaggaggaggaggaggcctgagtgatgtggacccctgagccaaggaatgtgggcagcctccaggtaatggaacaggcagggagcctagaccgtctggaataatgcagccccgccggcctattgcagacttctgacttccagaactgtaaggtaataaacagtgtctgtttttttaagccactcagtttgggctgtttgttgcagcagcaacagggaactaatagacactgaagaatggattcagtcactcattgactcagtactgcgtgtctgctctgccaggcacactgcccggcccagctggaccttgcctcctagacagagagacagaaagagttttagagagtactgcgtgctgccatgagaatagaattgtcacgcagtagaaaacgatggggcaaggaggtgcagaggggcctcgttttgatggggcatgagtctaagaaggcccctctgaggaggtgacatttaagctggaacgtgaatgtaaaaaaggaagtggccattgtgagctctggaagccaagggttccaggcaggggacactgtgagtgctgaagatgcagagggactcatgctgtgacaggaggcaaaaggatgcaggactcccctcctccacggccctccccaccttgatttaaaggaggaggctgtggtggctcaggttttcttatccccctagtgggaaaacctcaggagaatcttttcataccttgatcttgcccaagagagttgagggtatgcgtgggaggcatcctttctcatgggcattttgtctgcgactcttgacatccgtttgctgtgcccagtcatcgcccgtcctctgccccagcactctgatggcagtgttctgagagcagaggagccttgactcccaaatctgttaagtgatactgtgtcagagctgagaactttctacttttgtcatcaaattctaaattggctttgtcatctggagtggagcagccttcctgcgcacagtccctggcaggagcagcagcagaaggtcgagggccagcccttctgggtccagacaagctgtcccataccctgccctggcccaggtctgtgcacgaggaggaggagaatgtttctgttgctggcttcttatgaataagcactgaaggctcaggatcaccgtccactgtgtgttccctcatagcccttgcagtctaattgttgatgtggattttagagaacatttattcccgtcacctggttttaccagcaaaaaggtggaggccctgaatggggatatggccaaagtatgtgaagagctttcagaacccctacccctgctccccgaggacaaggaggatcgtagacctaggaaactgcggtgggaatgctgagtcttatcttttgtaaggatatctcctacatctttttatttctttatttttatttattattattattattattattatttatttttgagacggagtcttgctctgtcacccaggctggagtgcagtggcgcgatcttggctcaccgcaacctccgcctctccagttcaagtgattctcctgcctcagactctcgagcagctgggattacaggtgcatgccatcacgcctggctaatttttgtatttttagtagaaacgaggtttcgccatgttggtcaggcttgtctcgaactcctgacctcaggtgacccacccgcctcaacctcccaaagtgctgggattacaggcgtgagccaccgcgcccggcctcctacatcttttttaaaatgcacttcccttatccgtctgtgaatgcttttgagttgcttttgtataaaatcaagggcatgttttctgaatggtctctatttttaattaagtactgattttttaagcccccaaatgtcgtgtctcccagaattagaagtataaatgaccttcagggaccctctttcaactctgccagatagtctaggctcctagaaccctggaaaggtgtttggagatacatgcaaagtcggtgtgccatggtaattatatgtgaagtgggttattttggtttttgtttatttaatgaatagaataacgtagttacacttagtaatactcattcacccaaaggaaggggggctgttaaatcattgtgttttttgatgaatggcttgtacactgaaaaataaattggacaaactggcatagagctcagtgaacatgaaatcagctattagaagaaagcttgtgaacaaattctgaggcagatatgcatcttttgattaatgccctatcaatcatccacacagctaccttagctaagtcttgccataatcattcatgcttgcttttggaaacactggcagtaactataacgctgcagaaacggaatattattactgatttctccctaacttactgtgaacaatgactgttttcaccacgtttctgctttcctttattaaggaaatacaatgtagaatgaaaggagagtttctcaaagcctggtgaaattctcctagggtattcttaatgatattcagtcttaaatgggcaagctattgtaatgtaaggttctctgcaggaatgatagtaatgtaatcccattgaagctgcctgttatggattgtagtcaaataggcaaaatgtagagtcacattaatgaacagagtatatctttggaattattacttaaagttgttgaaatggtttgaattttgctattgtaattattttattctcctttaatgcgcttaatagccatagtaattaacccaccagattggaaatttgcatgagttctaactttgacattacaagaaaccctgattctttctgggtattacacagcaggacagggagaaatacatacatatatatatataaatatttttttcactgattatttttttaaaaagaaatttccatgaatgcaattattagtttttcatgcatttttaagccattggcaaattccttaagaacactccattcttttaagaggatttgattccagaaccacactggcacaaagaatgatttggcattgcctgctagtcgagaaatctttaggtattatcactgcttcctcaggacttactgtagcctgggaaatagtgtggcataataaagtggtgacagtcattagcatgcataatgggctttaatagacattaaatgctgtttagctagaagagggagcagtgctctcccactggaatattcctccatcgaagcccattgatcactgatttcagcggggagaggttaatccatcagcttctgtaaccagacggcactgatggaaattctttaggtggcattctggatgaaccaagctttccatctttacaaacaaatgagtgatatgacaagcatggtgttcaaaacacatttaaccaattgattttctttcctcttgtaataagatctggagacatatgaaagcgtgcagtgtgagctaagattaaaggaattgctccatgcacaggaacatacggaactaagagccaataaaagtcctataaagcatgtagtcacccattctctttttatataaagtttgttattgcaataaatagttattattgaactgatgccttttatttccgtttttgcagaatcttgttttaggtctgcgtgtatgtgtgcacacacatgtgtgtctcatctcagtgttcatctttctcttagaagttttcaagatgcttggcaataatcctaccttctcatttaaacaaatttgatttgggatggtaaaattatagatagaaagctgcagatcttgtgtacttgtctgagctcagcgtttaagtgatgatcgtctttttttatctcccccgtgcagccctgccttgagcttcacctactcttccgcgcccgtctctctccacatgcatcagcagatcctaagccgacaacagagcttaggttcagcctttggacacagccctccactcatccaccctgccccaacttttccaacacagaggcctattccagggatccctacggttctgaaccccgtccaggtcagctccggcccttctgagtcctcacaggtgagagggacaggtcgatgcacccggccgtgctggtcagccgagggtgggggcaggccaccacgtcagctgttaatcaacacggcacctctgtgttctcacagcctctgtactagcatcctgtcttcttaatgctgaggtctagtcttcagttttggtggacgtgttgtgtaaatgcttctcatcaaacagttttttcccccagggtcattttcccatgggcatagcagcaggctgcttgataaggcttcactgtgacctggtgccatctgtaacctgcatcccatgtcagtgcagcatgtggatgcattgctctcatttggtcactgttcactccctccgctagaaccacagttgcgacttaccaccaggtggtactttagagtaagactaaaactgtgctttgccctgcgttaactgttgccactttgatattgtttggagaagaatctggttgctctaattaaagaacttcacaaatggaacgtgttggtcttctaccctcctcacaactttgttcttttgaaataccctgttggagcttgttaaagcctagggcctcagctccattcttctagcttttaaaagccatagggagtttatactcacgagttaaaaatgaagagctgccgcatgaacgtattttctagctttgaacatactatctgaactctgcttacactgggattggagaattatcagagtcattgctttatagccaaataagaccgcttgtcccgagttggcaaggttttaattatggtactgctccttgttgatgaaaatctttttgtctctggctctgcaaatgtgaccagcagaacaagcccacgagtgagtctgcagtgagcagcactggtgacccgatgcacaacaagaggtccaagatcaaacccgatgaagacctccccagcccaggggctcgggggcagcaggtaggacacccaggccgcacaggccagcgcccactcctcccaagactggtgtctttgggtcagctcccgcttcctccccagacctggtgtctttttcacggcagttccttgtccactgcattgttgaccttggccgtactctacatgttgtacaaaaggctagatatggagtgactaaatcatttttctagctcagaagcaaacacaggcagtgcaggaagccatgcgggacataccttcttgatagtttaggcagcttgggagtattggcaactgtagttcgtagaggaaatggttgcattaatttgttgctggccacaggtgcgaccaggcctcagtcctcatctgtgattttgggcctgaattattgagctcctggacccaagcctgagctgtggcggatctactgatggctcctatatcattttttcttattttgctacttcccactttctaggagagcctggcgaaccagaagggatgaaaacataactaacctaaggctagttggattctggcactcagcctaaaattctgaaaggaagagtgtaggatttcaatccggactccgcctctagtcacttaaattctctgggcctcagtttaaggatgtgtaggttatacccataatatcatctcatagggctctcagcctgatgcaggaaggagctctatgaatgctaattccccaccatagagattggacaagagtccagatgtccacagaatctggaccttgctgtcatcaggctgcttcagcccaaacctcagactgcttgcccaaatttccttttcagcaagaacgtggaggctggagtaaattggtgtcacgggctctgaaatggatctttcctcttgcatatcgccagacagcaacaaccttgctggttacacttcaatgcctgcatatggcttttatcatctagccctggattgggacctgaatctacacaagatgaattctcaaaatgacttgtattggcattgctgtgaagctgccacaggggtttaggaaggactgtgcccctgagctttgatgctgtggcccctgggccctgggtagtgagcatatccttagagatcagaggttgaatcgagagggcattatccctataaagtctacaaaagtgtctcacacagtctccaacagcagcgaaaacagcattagaagtactagtaaaccatttccctggattacaaaatataagaataaacaaagtaacagaccaaaaataattaaaacaactaaacaaaatagaagtaccaatcttttgggtaaagacctgatttgatttattctcttatgagctttgttttgttttttgtttgtttgttttacgttttgttttgggtttttttttagatgacatttgggtttattttcagctttgtaatcagggcagcaaagtttgacctcaacttttaattcataattttgacaggctgttgccttgaatcagacgtttaaaactctcagagtgtatttggtaaatctgaaaatatgcacagatatgattttattgtttgacttcttcacttcacaaaaccctagacccaaatctaaattgggtttttactttctcttcttgtcttccctcctgttgtgtctgattcttcccccttctctgttccctgccccccaccctcttctttcaggaacagcccgaaggaacaacccttgtcaaggaggaaggggacaaagatgaaagcaaacaggagcctgaagtcatctatgagacaaactgccactgggaaggctgcgcgagggagttcgacacccaagagcagcttgtgcacgtaagtggatggtattcaggaaccgagctttacagctctgtgacactttccagggaggtcagcctctctgaccctgagctgagtcaagtttcttaggagccgcattgcgaactggagagggctttatgactttctgagaataaagaaaactcggagccacggtgcttgacctgttcagtcagctaaagctgagtgtaaaattcaataaagtcttcaatagagagtgtaatgactctgatcctgtaagccagaaaacactattttgagttagcgactttgatggttattgagtaatagtaagctggacatgaattatgattaaccttttaaacaagtttgattccccttccaagacccggtaacaatggaaaaaatgtggagatgagggatttcttttttcctctcccaaactctcaaagcctaaggaagctcccgttcttttaagctgcagttagtactctatatgagctaggtagcataatttcttggtttgaggccagcccttgtggggttagtagtttcatggaaaaagttgtaagtgtttttaaatgtatttagtgatggatgttttggaaactgcagcatggtcagattgagaaccacacctcctctcccaaaccaggttcagaaatttttacacactctcctgcatatcatttcaaaaaatgcagtgtgcacaaagccttctccccaccccatgcctgatttgtgatacccccttcccagtgcttcactgttcttggcactttcttgaaggccagtggagttttccctggaaaatgggaccaggattggctgacgtggagggcatttagatgatcgagaataaaaagatgcaggtgctacaactcctggcagaagcacagggtcttgttgaggcattaagtgtggcagttttttaaacttttaatatgaaaaattggacaaagtagcatttgttgcgattcccctcctcctgctctctctctttttctctttctctctccactttctctttcgtggtacattcttttttttacagtaactgtatttttaggcaattcatgtttcttgataaccctcctccatttagattaaacactaaaattatgaagtccctcttacatcccacacgtttcataggcagtgtgaacttttaatgtgtgtctcttgcaactcggcgcatcccatgtaatgtattccacgcattgcagttacattatagtgttaagcacgcaggttgccagattttgagctctgttctatacagaatgttttgaggattttacatgacatcgccagggtccctcccctccatttctttttaaatcatgtctcctggtaattgtatgggaagaattatagatttctgagcacagaaaaaaaaagtcaaatgtttttaattaaggtatatttccagaatttttccatgaacttaattcgattctttctctttaatttaatgcaagtgttattttgaagccaagcctgacttaatggccgtttattcttgctgactgttttaatggaaatcacaaaaacattggaatatcaaaggggaaaagtttggaatttttgttttattgtggggaaatactcccaaagagtagcatatgctatgtgtatccttagtgatataacgaatgaccaacaaacatgaagagaattgtttgtgtaaaagctgccattatagaacagatgttggcagggtgtcttggtttttaaaatatcctgaaggtgacagtctcatggtgccgttttggaggataagtcattgtagtttgcaaggaatgttggatactggttcagtcattaccaaatcaggaatgaaataagagcttattctaagtctacatttaaaatgaattgtgctcctcataagaggcagggtttgaagtaatattttttggagtgcggtagtagcttaaccctttcacaacctaaatacagtaatgtgaaagcttttaaaagatggtgaaattgcaggtatttgaatttaatttcagtggccgatggtctcgatgttttaatagagagatctgagtagttttaaaggaaggctgcttaaaactaccaactaaatgaccaccatattgtctgttttatcgaaatggtctttaaaaaatatgactgcgcacatatacagtggactattttaatttcagattaaccagaagaaattcatgtcaggattagaagaaaatctaatatattacctttatgatattaattttagtctgagataaattatatgagtaaataaacttaattaaatgaattaagaattataatttacaacaacataaataagaatactagtttatgtcacttattttccacctttttacttactgtctgaggtgcaggaaccccaagtttgcatgtttaaattgattctacattgcatgacatgcgtgtactttcttacccatgagtatatctggcagcagtaatggtggcctgttatagaataggtaggtgctttgtattatgttgattgaaggaatagctacttcaagtccacctaattactttggtggtagaataaataccagttgcaaaaactacttttttttttttttttttgagacggagtctcgctctgtcgcccaggctggagtgcagtggcgcgatctcggctcactgcaagctccgcctcccaggttcacgccattctcctgcctcagcctcccgagtagctgggactacaggcgcccgctaccacgcccggctaattttttgtatttttagtagagacggggtttcaccgtgttagccaggaaaaaactacttttttacagagggaagcattaacagtttccattcctgtgactttccttggagagaggacattttgtgaattagttgaattttcatgccacatacaaccaagaggcaaggtgttaaaccattctgatgctctgccttatttatagccgtgacccattctttttccccctcttacagttaatagaaagattcatgattcttcatggttgtctatctagtgtctgacagtcccgactgcctgctaaagcaagtcactatctataattgatatccttccggggaatagggtgctggctgcaattgaagggctttgctgaaagctcttaaatcctgacaagttctccccttgttctggttcagtcgttgagctgcacggttggaattccagagttatttgaacttgagacatgtgtttcacattagcaaatcacaatttgatttgaagaagagaattagaaacttggctgactttgcccgccaggtagtctgatttccactgtaatgcactccatgtactcttgaaaagattacctcgttcattactatctgaacagatgggctaaacattcgcctttcctttctcttctcctttatttcaagcccctcttcttcaccaattatgtgtttattctaggtttgctgctgggtctttatcacagggatgtttaattaatttctctttccagcagtataattacaactgggcttagttactctcaagctagtattaaatttgtcataaatttacttctgtgaccagaagctaagaagataggtgtgtatttttgttagctttgttcttgtacttcatccctttcttggtgtcggttaaaactgaaggaaacaaaaaagcaagaggagtatatagaaagaaaattaattccaagtacattgaagactgaatttattattgatttgccaagatgcaagtattttctcttgccatttgaaaggcacacattctaacatctcaaaatgagttgaaagtccatatttttcttcaattttaaattaaccagacctttttttttgttgagcattatattataaaagacgtgaatcataacttcaaatgtgtttctgagagttgtagtgtatccactctcaaagtgtcgtttggttttgctttctgtttatgctatttggtttgtgctgatgttatttggtttagcttatgtttattatgtaaaacagctcagcccaacttcttccaaggaggaaggatgctttctgtctacacggagatccatttccctcatgttttaattttgtccgagaagtaagttccatctttgggtctttgatgtttgaggtgtctgaaatatgcacagcctgcagcacacgttagtctcaggttctctgaaacctgcacactttggttgtgcatgacattgtatataccaactatgttttgagaggctttctaagaggaggaataggaataaacataaagaacttccatctcagtgtggagtcattactgctgagtggctggttatgcttgaaaacatcagtgctgagatcgaaagaataatagtatcatcaccatacttcatgtccacctgtttgctgtaactctgcaactcttcaccctcaatttcaacaatccaaccccgtatttctgtgtaagaaataacacatgtaatattatccccaagggtctttaaaaagtcaaatgattttaaaagttttattccccagcccaatccccagcagcataaccctgcagggcccttggcaatcgcactgggggatgttgtcttctacctgtggggcagaaccgcagagaaagtgagatgtatttctgttagcacccagcttcaactgggtggcgttcaagtctctgtaatcctccatttgtctccgtgaagcattgtgtcaaaaattcatctttttgtagagtgattaaccacctacttggattttaaaatgctttcatatgctgcgaattttgatctctaaaagcatgctgaagtttcctttatcagaagaatacagtcataatcacctttgctgccatttggaaacaaattctatacatcagcagcatgaaaatgaggggctttctttttaatatagagatttagatataaagaaaacacatctaatttgtgaagaattgatgtgtctgtagaaacgcaaggaagagttaggatgtgaagacattcttttcacattaataccgtgatcctaaatttgcattttaaatgtttcccatataatttcgatccctttgctaaagttgcattgtctatccttacctaagagaaaattgagtttaagatgcgataggggtctcagatatgaggcagaaattagttttgtgtgcacataaaacataaaacaaatgagtggagattttgatcttattttccctacatggagttgctagttaattcggttactctaattatttggaaacacggcatataaaatatagactaagaactacaaacttcaaagccatcttttgacaattttgccttaagggtcacgttctctttaaagttgctgactaaattgcacctgcagaaattgttcccataaagagacactcaggagatcagattgattgcgagggtgtgtgagggctgtgtggtccaccggccagagccccccaggcccagctaggattctgagtggcagccccatctctgccctgactcttgggatgacctccttagaaccatttgaccccttagaacgttattttctcacttatcatactgtgaaacagccatgaaaataaacgctgtccccaacgtccaaggccaagcacagatcacatgcagtaggtctaatgagaaacagacagagggtctcgaagaggtcactcagtctctcattgttttatgtgtgtgtttcgctgggttgagtgggggaggagaatgcggtggcactgtcggtttctgtggcttattttatattaattgttgctaaactgggatgtacgctagactgaagccaagagacttcctttttcttccgcattgtgtgtctgctgaataagacctggccttgcctcgttcaaccttggtttcagtcaaagaaagcaaaaagtttgaattggatagtccttaggacagggatggtaaacagattctccctcaagtgcgagctagctggctggcagccaccaggagtactgtgcagagtccccctcccctttcagcctgggagggagtttggggtgggctgggagtggcggggggctgtgaacagttatgggtgactgcccccaggtggagtttaagaggcggccatgtattagttactttcttaattcattcatccgttgtatactccctgaaatatttcatcaaaatcttcctccgagtaactgtttctgacatctggggaacattttcctattgaaagctttttagctggttctcaatgatactttaggtgagattctagattctgccaatagttagtgccctggaatattctgtatggatccactccagacaagtgggaatggtggtcactttgggctgggctgcatacctcatttgaatatgcttgcctatagcagatgttgctggcataatgtattctcctgtttattaggaaaagtacaagccaacattagtggatcagccatttgctcaacagctcttgatgagatgtgcagagccctggcaggtgctacatgggctggggacagcccatgtggtacccacagccccagctttgtggtggacacatgatttacaccctcaaagactggacagtctgactgggaggaggagataaggaaacataaaagcatagtgaacaacaagaggtgaaacataaagaagccataattgtgtattgcgactctatgggctgagagagggaggagtacagaggaatactggaaaagactcctaggaaacaggtggaaaatatggttagggtcaaagtaaatcatgcaggtaaacttttgaggcctgatgaaatgatgatggtggtgatgatgatgatgatgatgatggtggtgatgatgatgatttgagaagaattagcacctgatttgaaggaataattttgtttcccatcattacccagtggcagtacagtgtgaatgtgtttcaaagcagacggacctgggttcacggcctgctctgctcccaaggaaaatagtgacttttaccacataaaacggtgagggaattagctaaaaaagttatactcaataaaatgttagtgattctgcttacgagagaaaaatgtcaagatatttagaggctgctgtgtccatgcatgtcacgtataaaagcaggggttaggttaatattcaggcagtgttggggttggtatgtcagcatgaaattagtaattgcagaaagatgtcgataggcccccagttcatgaaacactgcaagagaagaactggagcggcgctctgggttcatttcttccattgcaggttcttccttgtgcttttctgcagtgcggagattccatctctcctgttcatgtgtcctgacatccttctggaaattttcttcggtggttacaccaaaccaaggtttctccactgtagcacataagggcagatcattctctggtgttgggggttgtcctgggcattgtagggtgttaagcagcatcccaggcctctccccatgagatgccagttctttatagtgggaggctgtcctgcgcattccctccctcgtcatgacaaccaaaactgtttccagacattgtcagatgtccctgggagacagtattgcccccagttctgccctaaatatttcctcttgtcgcgtagtgtggagaaagaaaaacacacgtaagaaaaacaaaaaaaaattgtgattaaagaaaaagtttctcctgtttaaatgttctttagaatgttcagattagaaataagagatgatctcattaaaatgtctctagtaagaagctacttaaatatacctatgtgtgggggggtgggtgtgtgtgtgtgcgtgtgtaaactggcagagcttaatttaaaaaccacatttgctaaggttaggcacacagtagttctcagtaaggcccataaccagccaagcccgttttcttggtggagaaactccatcactattttttttttcaggcctagggaagtcacacagactccaacttctgagatcatagcaagcagagttggagatcaggctcctgctttgacataaaacagagctccgggaacagaaagcagttttctaatgcgaggactttttttttaagatttggggatatttaggcttctctgggattagccaaatactaccatggaggcatttttattttttctagaacaattaatgttgcaagagaagagaactgtaaatgggatatcctcaggagacaatgtgtaagccaaggccttaaacttaaaccaactccacccgaccccacccagttaccagtaaaaccagcattaatcagtgagtgggggatgggaagaacaccagataatgtgttggagatctgtctttcattcctacatctgccagaaactgtttctgaatttaagtaagtcaccctgcagtaaatcctccgtgtctcatctgtaaagtggagataataatatccattctaggttcttcactgggttttttaatttgttttttgtttatgaggatagaatgagatcctataatggaagtactttgtaaactcaaaagctttattcaaacataaggaaaaatccatagcaagtagtactaataaactcactcaactgaagaatggagagattaagtgcacttttatgaacatttaaaaatagtcataagtataccattgatttcagttgcacaggctcgcctatgcaggctgctgttaatcttacctgtttactcatctgctgttgatccatcgtcaccacctggtggccactacagaaattgcaggcatagcagctagaagaaaacgcttcatgcatgtccgatctagggtgctggggttgggggctatccctttgagtaaggggagcatacagggcaggctgttatgagtactatcgatgtacaagcaggacagtgggaaaatgagtaaggtgaaggcacagaagaaggaatgaaagatacatctcatggagattggatatgagcatggtatggaataaactggtggatgtaaacacagaaagaccattgcagaaaggcattggggattctatgtggagaagacagcaggaagaagttaaagggtacagaaagtatgggaaaattttatctatgattatagctaatataataaaaggctgaggtttttggcatctctttgaattagaaatataattacaaatgatttgttttatgctttttggttgaagagtggtatgataagtaatgcagttagagcagaaccaaagtatgtccggaaggcagaagggtagtgggtagtaagattaaagagccgagtagcaccatgtcatgggagatgtgattgctagactaggagtctgacttttattccaggtggagtaaggataattaaatgcttttgatgagaggaatggcttgagccagcatcagctttagaaagatggggctgagccttgcaaaacctgggaagttgcaagtacagtgtattaaagagggcaaggttagactggggtagggccagaagtgagactctgcagtggaagttatttgaaattattttttaaaatttgggaggatagtttggagatgttttacgagtacagtttgagcagctgatgtggatgttctgcatgatatccagagagaagtcagaagcttcagggctgctggctgagtgctgggaggagacgttacccatggaacctctgtgtcttgcctgtgtggcatcaggctctttaccaaagggtactaagattctgctatctttctttaaaacaggattatcagggtcgttgggataattatctctgatagtttatgggagatacctactacagtgctagtcaagtttttagagccagttagcttttattgtgattgttatcatttttcctttgtcattattttgctttgtgcaaaataagatgtgccaggccaagcgagtggcacatgcctataatcccagcactttgggaggccgtggtgggagaatcacttgaacttaggagttcaagaccatcctgggcaacatagcaagaccctatctctacaaaataacaataataatactaatttagccgaacatggtgaggcacacctgtagtcccagctacttgagaggctgaggtggctgcaatgagctatgattgcaccactgtactccagcctgggcaacagagtgagactgtctcaaaaaaaaaaataaggtgtgtcttattttctagttatgaatatataatcctgtggcacacaggcatcacctggcaaatagttccatacatctacagtggccacttttcttccaatcagggcaggattgttttggacgaatacagagaatgaatattcaaagcattaggtctggtgggcttagacaaataaaatagacaggtaggtcaaccacattttatttctaagtggtgattcagatgaatgggatgtagttcctgatctgtttggcaggaatgaaaatgtctttctaatcaggaaaacaaaactgcaccagctgtcttctgttagattcacaggactctctccggtcaaccatgtctctaacataaccggcccaatcttatctcggctgctctacctgcctaaagggacatggtgtttctttaggctctcccttgtgcttcagcacatgtgacctgtcccaaggagctctctaggacatgcgggagagcccagtttgtgaagaggaggtcttcctggtggcctttcctgggggcagggagagtttgcacaggttcctctggtgcagtttctaccacaagataaagcagtcaagctgcaagtgaaacacagccctcactgtattcctcctcgtgtttagcagagataaacttcactggaatctcagtactgagccatttggcttctggctgtagctttaattgatataatgcagattttttttttcttgatcaagaggggattattcttgttatcagtccagagcatcttattttaagatgaaaagcctttacggaattacagatgccagcacttgtacaaagctttttggcgattgacaactcaaagagaaagtatgatttattagcctataatggctaaccctgagcaatggtctaggtcctactgatttgtgaaattgcttaacgtgaactgcctttttatgctacacaagccccaggttactcaagtaaatgtagtgtctgcattacatgaaatgttacaggagagagaagaagaaaagggaggggggagaggagcaaggtggattctaaaatccatcttggtggtgccttttacagtagtttggctgataagccggcagaggaaagattaataacgaggcttgtcgctatcagtacctgcttgtcgattctctgtaacagggctgtctgttcagcatggaaattattgattaaataaaaatggctattagattgtgacgtgatccataatcacaaacaatggtggacattcctctcttagatcctcggccatgcatcaagtcgtttcttttttcccctggccgtaatttatattgcgctgacacttgggctcattaggtttatcctttctgctcagaggcacgagcggtgaggaccagcaggaagtcggggaggaagagaggagagatgatggccccggccagggatctggccagtgtactcactgggctagcataaacatgttgcagtaaaatacatatcacatagcagttaccattttgtccattttgaagtttgcagttctgtgtggcattgagcgcagtcacagtgttgtgtaaccgccaacactgtccacttccaggacattttgatcaccccacaaggcagctctgtatgcatgaagcggttacctcccattccccctccccgccagcccctgaaaaccaccaacctgccttctgtctctatggatttgtttattctggatatttcttataaatgaaatcatacaaaatgtgaccttttgtacgatgtctgccttttttgcacttaccatgttttcaaagttcattgatgctgtggcaggtatcagtgctttgttcttttttatggctgaataatattctcttggatggctggctataccacactttgtttatccgtgcatccgttgatggatatttgagtttctactttctggctattgtgttactatgaacattcatttacaagttcatgcttgaacacctgttttcagttcttttgggtatatccctagaagtgggattgctgggccatatggtgattctctttgctttatttcagaaactgctaaagctatggcagggtttaagctgtaggctctgcctttttcaggtggtctcacctttaacttcattctgcttccctcagtaccaccccttcttgcctgagtgctgcctaagctcccctgggctggggactcagtctggctgtggagtgctctatgacactgctatctgtgggtacacaggcattacccagcaaataactccatacatctacagtggccacatctacagtggccacatttcccctaaacaaagtgggactgaatagtcaaagcattaggctaggtggactcagacaaataaaatagactggtagattgaccacattttatttctaaatggtgattcagaggaatggggtgtaggttctgttctgttctgtaggaatgaacataatcctcttttagtagctggtttgtgtcctccttcctggacattattgctgtggtccctcctagttgtggaatcttaaaaatgacctaaccaactacaaggaggtctagcaaggctaaaaaacatattgaaggccactaaactcattagtgagtggtttgctactgattaatcagtttcctcatacacaaatcatattgttttaatggctgcttggtgcatataaggaaggtttggcctttagatgttcttaactattaaatgtatgcattttattatctcacacttcaccccaacaaagacagtccccttcccctgtccacttcagtcaagttgcctcaagtttgatattttcccacatgtttatggccagttagataccattgaaagcgaatataacacttcatcagaaacttcagactctttgatcaaaacacaggtgaaaatcacatgctcatctataactgaatatttccactcaggctgaaacccatgaactcatccagaagaggcatctgtctattgatgtggtcaggtgtgctatcgattatcctaaacttaaagctggaagcaacacttagaagaagcataacttcttaacttgaacctccaagctcccagtgcactcccctacccagccctgtgttatttaccgtcccactttaagccgcagcctcacatggagagaggcagagatgaggcttctccagagggaaacagctctcagggcagcctctggagcctcgtgcaggcacaggagcaggtgcccaggagcagctccgagtgtcaatcctggcttccctgggggccttgttgaatagcaagagactttggagaaagtgctgcaagtcagttgaggatcattccagaaagccactgtaagcattcatggattatctaagaaagaaaagaccaagtttgaagaatatagatctcaatggaattctttgataaagttagatacatacaaaagattgaaagaaagtaaatatgtggaaataagaaagaactagtgacatagacttacctgaacatatccagtccactggggctactgtgggtcctgatggccacagagaggatgctgtgggatccaggaacggggaggcacatcccttggaatgaatggtttacaatcaacgaatggcagtgaaagcaagcagctcacttcctcgtttgctcatcttctgtgttggtccaagtgaatgttcatttgttcattttgttatttgtttggaacgagaactgagaggacagtgatgacgccgatgagacccgttctcctggggcttcccattgggaacagagacagcaggaaaaggaagcatgcgtgcccagctgacacaagagtaagatcgttgattggtaagggagtcagaggccagttgagtggcaacgtcaggactgcaattccttacaaatggcacgatgaaccaatatcagaaatttttgatcaattacaaaaaaaaaaaaaaaaaaagaacaatttgctgggggagatagaaagtggtgactatcgttctgtactttcaaaggggacaagaaaatgaattcagaaagttccaagggtagggtcaagtcaattctagagaaaactctatttttattatcataaacgtgttgtcctgttataagataaaatggtgatcattgataccctctgggttcactaagaaaactgtcacactagaccgggctgatattttctttcacaatatcattagactggttgttcaggaaaatacagtaaatatgattgacgggacttcagcaaaacctttaataagaaactacggccaaggcagaggaagatggttgtgttaaacagcagttaggagatgtagttgttgggtggatgataagggcatggcttggcatcagtcaagggagctgtttctagaatcgtgctgctgggctgggctcccagccctggtctgcataacaatttggtgtacctgtttccaggatgaagttgtggagtgcaattatcatcagagttgtttgtgaggaatatttatatccagttagtgactgaatcaggatcctcagagatcttgaaaaataaaaaacatgaaatagctctaaggagattaaaaattatgataacaacataggacctttaatcaactataagttcactattacaagacaaagatagtttccaccaagcctagctaatgtgattctcaactatagaaatagaagtatgttattagaattacactcaaagtatctctggaaaagagcaccttagtctggcactccactttctaaagatacactgatgtataggcattggatcaggtagagaaagaaccagacttgcctcgtgtagagtggttgacagaaccagataagaaggtgtggtttgcgcctatagtcccagctacttgggaggctgaggctggaggattacctgagcctaggagttcaaggctgcagtgagcacttgtgaatagccactatgctccaacctgtgcaacatagggagaccccatctctgaaaaaataaagaagaaccaaggaagagaagttttgcaagttgaaggtgggcagaaagtgccaagggacatgataactgctttcaaatatttgttggtggttggctgtcctgtgggagctgcatccagcttgtcctcaatgtatggatcaaaggtccaatgcatggaaaccatagggagacagatttaggcttggtataaggaaaaccgaattgtcctctgagacccgtccaaaatgtttacccaggggaaagggagctcctgtactgcaatgtgaggttgtttaaattgtacaccatgggtgtggggtattatagaggtaatacagagcatccagtgggttgctggactagatttacttagtcccactcgaacctgagtgaaattctttataccgcagaagtttcttgcaagccagttacatgcctatgtttaaagtagggactcattttcatttgttctcaacaaagaacaatatcatctcagttttataacactccagcagtttttcctctccatctaggtcaagacttttccttctttattttaatttttttattataaaacatattactacttagtaaaacaaactaggccgacatactgtttgaaagggtgaacctctgagttcctcaggtaactgacatggggtaagaatgtgggtactgtgaggcctcagtttttccttgtataccagagccacctctattgtaaaaacttcttagatttttttagtttttctcacttcattttgatgtaaccattcctgctatgggtattacatatgaaaattcccatataattttctttagaaattagtcttgtgctgtgagtgcttttgtatcacatacattttattctgagatcctttgagataaaaacattagtgccgagcttattgagaggtaaataatcaagtactttgagaataccaggaaaggcgtttttttcctcaataagtacttctttttctcttgggtttgcactgtggaaatgtgtgccctaactcttaacctgaaggatataaaacttggtgtgatcattgagtttttaaaatcactttttttaaactgcagtccttagcagagtgcatctcaatcttgtttttatttcaagcacataagagatgacataagaacttttaacttggctgagctctttctcattctgtctgttgcgtagcaatatcttgctgttgggttcttttttcttccttccttttttttttttttttttttaaatttcctccttagcatcattatcttggtaattcacttcactctattcccctgtgttctgggtggagctaagatatctttggtggtgttggtcaactggcccttcattttccttctctccttcaagaatttcgagttaagaatgaacgtttccttttgagagattgttggctctaagctgaggctgagctaaaaacacctgggagagcctcacctgctgcctgtggaacccagccacatttctgttgcctgagaaatgacccaaccctgttatcacttccacttcctaatgcttttattgtcaggaactcctgaaatgtattaagaaatttagaaactaagaaatgaataaaaagaaccaaatagaaatgaactggtctttaagtcctaagaaagtgctctgtgaaatgcacttaccagggcctccctggcaattcctgttagggatcctgtaagtgtcagaaatgtctccccctgagaaacttgggctctacctggctgggtcacttgaagttatccatgtttccctggaatagcacattcctgacttgggaataaaccttactgtccctagcccccaaaattaggagttgtagtccttgtcagagccttttgggcctgtcccctgataggatatctgtagcctcatacacatgcaggttcacacactgtatatctcaatatttagaagctgtaagccaagctcacaagctgataaatgaatgaaatgtttcatactttgtctaatacacctgcattgtgactagggagggcaggtttcatagagaattcttggactcctcagagttctctgccagcacgtggtggcccagggacagttgtctcccagcccaccctcttctcctcccactcttggagatgtctgttcctgagcctcactgcagagctgaggaataattcctgtgcatacagagatctgagaaccactgcccccactaactctgcattgagggaagcaccaggcagcctgtgccccattggagcctgaagtctggcagacaacagacagccttgttctgggcaatgttgcccttcgagctcgggtatcccttatacttttttaagtacagggggatccatattctagtttagaatttgttctctgtgtcatttgctaaacttattttatcttttgagggatgatatattcaaattagggataagtggcaaagcaacaagatcctttatggtagaaacatgcatttggttggttctaagagttgtaacatcatttcgcttatggagaccatgctgaacttgggactatttctagagaataatgtgagatacccatccctcacgccctgaaaacagcctcatccctctccccttcctcaactcctctcactaactagtgtcctccagaggactccaaggggaaccctgtctttggtctttagaactcgagaggaacaaaacaaggaaagagaaattgaacaggaagttagagagatagtaaaataatatcctttgtcttcatacgcttccctcccttcccatgtcgggcagtggttaatgctgcagcagagcccaatgggtcggtgtctgaacagtggacaggagacctggggaggcgagcacctgggctgtattctagggaggcaggtatcagctgctccctgccaagggtacaaaaggcagcaccgtgttcactcaatggaccccaaaatttagaggaggtccatccagacatgactctgaatctgtgtgtgtgtgtgtgtgtgtgtgtgtgtgtgtgtgtgtatgtgaattcaggataaaaaatgttttttagcagttaagcactttgcaccacatccatccatctatccatccatccgttcttaaattttgacgttctaaaatatggcaaacattatagtcacatacggtagagagcccttaaagagaccacgctcaccaaagcattcaataaggggaacataatgaggcttactaaagcaacagggaaacggtaaggttcagataactatttttttaaagcccaaatccataattccttcaaaagcagttaaaaccagaggcaacttttattaaaatattaatattttaaaatatttttgtcttcatgtatttctaaaaattgagtctgtacttcatgtgttggttctgtgagtttctattttgtgtcttgctttcatcatatgtatgtgccatcatcactgaatcgttgtgtgtaatttacggtttttctcaccactctttttgccatcagaaataataaacctctttgtgtaaaattctttgttcctaatttggattgttcctttcagatataatttttaaaaccaaataactgagttaaacagatgaattttagaatgatttgaactaaatttaaaagaatataccattcggattttgcctggaatgttactaaagccttgaattgaaaagaatatcattctctaaaatccagtttcctggcccagcacggtggtttatgcctggaatcccaacactttgggagacccaggtgggtgcatcgcttgagcccaggacttcaagaccagcctggcaacatagtgagaccctgtctctattttaaataattttcctttaaattcagtttccccagataataatggagtatatatttttttcattttctgagctttctaccttgatttacctcatatttcatttctggcctattcctaggtaggaagtttttttctgtatgcatttttcctttcctggtcattgcttttaatagcaaaggtatactgggtttttgtttctttttattttatgtgcaatcaacttattgaatactcttgatatttcctcatgcctctgtattttatgtcttgggttttctaataatacactcctgtgatctgtaagtaagaataattttatcttgttaaatatcagatacatatttatctaaaatatcagatacatatttcatttatgtctcattgcattggatagatttcttggcattgtgttagataattgtgttggttgtataacaccagttttgtatctggtattaaagggaataatgcctttggggttcaacctttattattctctttactgttcagttaacatagataatgtttgggcatgtgaatgaagtgcccttctttctcctcctaaattttctaagacttttatctcaagtgattgtagttactttactgactgtttgccacatagagattactgtgtggtatgatatatttctatgtcttaaatcatctttgcatcccttgagtgtgccaggtgagttactcttttgatatgttgctagatacaggtttcctgtttatttataagtttcacattgttatgactgagatttatatctttgtttcattttttgtgctgctttgataccagagacatggctagatgtacaaaaatatatattctacgtcatatctatcatttccgtctcttgagtgccttacgtagcataataatttgctcctggaatttctgaaataacattctggtaaagctgtttggatctacagccttttgagaataaaatcctttaataatgatttttaaaatttctttttatgacttgggtcatatttgaatgaatgagttatttctattttctccagaagaatctcgggttttgatgagattttcaactttaatattatcaaactgtggttatttaaactaaatgcctgctgtacactttattaaatcaccttcattattttatttctctgtcatttgtactttcactcatttgtttagttattatcagtggtttcttttttatttgtttcattttttttccaggaatgagtttctgaaattagttatttatgctgctatgttaaattttaattgtgtcttttaggaaatatttttctctagcatcattttcttgggctgagttttgcttttccctccataatttctagtgtgaaatgctgctttcatttctttctttctttttaaataatacatgcacttcgagattataacattcactttaatttacctttgacttccatgaattttgactgtcttctttcttttgatatttcaaaatagtctgtaattatatttgtgtgatttattcagtcattaattccttattgctcaacaaatgtttttggatctactgctatcagtcagacactgttctggattctggagatacatcagtgaatgaaacagtcaaagatgcctgtcctcatggtgcttgcattcctgtaacaatacaggctctgaaactaatattaggcaactagtgcttggtttgtcaccacgtgttacatgccaggcactattctaagagcatgcactaacttaatccactcagtaacctaatgaggtggatattatcattagcctcattttccagatgatggaaacaagtcactgtgagtctgagcagcttgtctcttgtcacattgccagtaagcgggagagccaagttggcttcttacaaactgtgccaataagtatgctatgatttcttatagcccctggacatgagattttgcttattagtgtttcagcttgtggtacaattttataattttatcttgacgatagagatttaaatattttattgaggttattttcatgatgtgatatatatgatattctgtggtcaagtgaaaatagattctcaggcaatactgattgttatgtgtctgttctttcaggattcctaatgatgttcaaattcattttgtctctacttgtttctttgtctacgtattttattataaattggtactggtatattaaatctcaggtgattatggttctagccatattcctcctattttaacaggttttactttatgttttgatgctctgttatttggtggagaaaagtgttgcttttctttaatgattatgttagagaacaactacagctgttgtcgctatttaaactttttgtcataagtctaatttgtttaatatcaagattattatcactaatatattcatctgtttattttttaacaattctctataatttttagtgactttcttatgagcattatagctgcgttcatcaccctctgagaaactttgccttaaagtgggtggcaatgagtcatttattttgaatgtgaatttttgtgtgccctctcaattcttccctttatttgcacacgtgtgtgtgtgtgcgtgtgtgtgtgtgtgtgtgtgtcttgccatgttttccttatttttaccatggtcaatttggaagtaaacacagtgttttaaaaatagtgtttttgcttatacatttaatgaacacataattaaatgcatgatttctaattgtggaaaaataaatatcactccttgccccccaaacacacatacatgattttgcaagacaatttataatttaaaaatttttttaccttctgtcttttcttttctttctgcttttatcaattaatgcagtagactcagttattattgtaaaatgattaattattccattattgtcccccttgcttattattttatatgtttatttttataacagtcttcaactttgtttcatattttgccctgtgtgttagttgacttcaacgctgggttccctcatgcaatggcttcttctttcctgaaatatttttgttgccatccctttgttccttagtaacaattcaagaatttggcagagaaaattttattttctcttatatgcatttattaataatattttctaaaatggattgcagcacactagttctgcaggatgtcgacaagtatcaggtgaaaatgaaagctaggataaatagagttaaccatacctggctgtgagacttatccaagcctttcttatgccactatgtcttgcagctcttcaagaggagaatatggtcaggttggcctcctaacaccattgatcatagaatcctattcctgattagtatatggcaaaattatgttaacttgtgctttcctctttgggaggatacttctgtgtttgtttcccctttttttttttaacttttttttttttttttttgagacatagtctcacactgtcgcccaggctggagtgtgatctcggctcactgcaaccttcacctcccacagtcaaatgattctcctgcctcagcctcctgcgtagctgggattacagacgctcaccaccacgcccagctaatttttgtatttttagtagagacagggtttcaccatgttagccaggctggtctcaaactcctgacctcatgattcacccaccttggcctcccaaagtgctgggattacaggcatgagccaccgctcccggccctcctcctttttttttcttaaaatgttttaatggtgccaaatatacctaggtcttatacgtgaagttcaggtctggtttattccaagaatgtttaattctgttgtgacttaatttatctcagtttcctttattccactttcttctctcaggacatgtgtgggtccatgagttgatctgatttggtttccttggtcttcaatcagctccttgctgcctccactgtgggttttgtcctgctgttgtatgtttagactgcttcctatccccctcagccttctagccacatgcttctccacttgaatgctttctttttttataggcatcattgctttttttatttggggacagaaagcagacatttctaatttttttctgattgtttttcaattctttgtttacaagcttgcttttaccgagtctttagtggtcctcccccttgtcctcagcaagaaaagaatgttcgtggacctcctatgactgtgggggcttttggcctgtgtgcaaggtgtacaaaaataatcccattccatattggaacatttcctatctcaactcgcaaacatttttaggttgttaaaaatttgtttgctttttctgatttattttacattgtttctagagctttgaattagaatgcattcatgtacttaaaaaaccagcaagtcgtaaagtttatattgaaaaatcttcctctttcttttgtcctggatctgcctaattctcactctactctacaaatcaactacccttaatttctgcatatttctggaattcctttgtagatacataagcaaacacagtatacattttctttctccatccccttctaagatagaaagttcccgccgtgcttcctgtgtgtaatacggtcaacagatgagcgtgcttggctcagcctgaaccagttctgtgattgacgggcattcagccctgcaggacgaaggtgggatgttccctctccctgtctgggtaagacattgccactggttcttctctagttagtacagcatgtcatagtgtgggtctctggatgtgtggctttcagttcccctgctggtctgaggccctatccatgaggctgctgcaggtgctctctttttttctgattctgtagagccttggggctcaaaatgtgcttcatgggcagagaatggatagtatgcatttagaaactttgatggcattttgacattgccaaaaagtgtgggatttaaaggttcttttcaccaaacagaggatagactcatttggatgttatcaaattcaaggtcgccaaggagtggcccccacttgttctagtcatgtgtagcaggaccacatatccatcggcgacagatgagagaggccagaatggtccttcaccacagagagcttcagggcccctgatgcagggcgttggagatgtggtgtctgaaaggtgtaaaagaggagtggatgagggcaagaataaccaccctggatgactttgacgtacttgtggtttatgggaagatgtttgcctaattttgtggccagtgaagccccagtagcccagagccaatgaaaagcaatagtatcaatcagaacctttttctgtctttgtggacagtattgagttctgattcagaagatgtgtccaaaggccacattgcataagtcaagactacgctgctctgtgagggtgcagcagtctgtggggtgagttttcagtgctgctgttgtgcatacagtgatgaaggcaggtgtcctaggtcactttcatttttcccccatgttaatccagatggtctcattttttttcttagtagtttttgccatctaaggtccagcatttattgatgataacttcctatcatggcgtaatgtcctgtggaaaatgatatgctaccctctcttcaacaggaaactccattcatctgaataatccatttttcatactaagcaaacttccaacttctcaagtcacttgataccaaatgtggaaaaccctggacacatttgaacaaaatctcagtgcacgtgcccatcacactccatagagggtgaaaggctgtgtgggggaaaacacagaagattaaataggacattgaagtaggttggggtgaaaactaatatttttagcagaagagaaagatgcaaaataattgcaggtgttagtttatatttacatcatagatttgcataacacaaaaaagtgctttgattgttgatgtccaaagttgacgaataatttggtgagtaatgtagaggtgaaaatatccatagcttgtgcattaagttggctgtggagtgtaatttgtactgagccaatgttaacaccattcagagtctctgccaataaaatcaagcactctattgaaatgttctaatttattattttactttcttactaggagtaatggattttgtacttcatagtctgatgagaggtgttaaaagttagaggtgaaatttatttttgaggcatttaagaagggaaaaattatataagtgagggccatggaataggtcccattaatgaatgcataattagcaatttgtttgacatatcccgtgtcctgccatggtgggaagcagctgtttgcagcatattttgggcttcttttgaatggtttttacaggctttctggacacttcagataagaagcagtaaaagagctatttttttaatatgtataaagaaaatacagtgttctctgtcacatgcttggaatttgagcctgtggtgtgaataccttagaagaggtgccatatattgattacttcagccatctcagtttacttgtaaaataaatgaagtcagcccctggctcctctaagtccctagtgaccatttccatcctttaccgcctctttccaagcattaccttagaatgacctggtggagccagcttaatgacaacatgtgaaccaaaaagaattcctaattcttgccctttgcaaaaaataaattaaaatttaaattaaaaaattttaagtgtgcagccggcatataggagatgtcttctgccctagagcagaagcttccctcctctgacgtagagcaagaaaacatcaatattagagctaaattgagaaaatcttttcagtgcatctggattggtgaacggcttaactgcagctacaatgaaatatgaggaaacagattattggttcaagttatatatttatgttgcaccaagcaccagttcctgagcacctgcgtgtggaagtcagggtgaaggcctgtggggtaccaggatgaatgtgatacagttcctctactcaggaagcagtccagaaggggtcaaagccatgctcacgcaaaataaacccagctagaaagcaaagcagaaggtatcatttgagggattttgatgttcaggagaattaggacacacacaacgtccagccagaacaccagctctttctctctttatttttaaatttctattacttggacacttttttcttttgctcatctaatcatatgaccgcaaagagcaatagtggatctgatactcagtattctggaatgatcattggcatctgccagaattgtcagtagcgttcactttagtaaaatgtgaacactgcaaaactcctaggtcccagccatgcctagtgtaaaaatgtcagcctgcaaagttggtaaagtccagccaccacatagtgacttttaagggtgttgtaaaattctttccataaataatgttaaagaagaaaaaaaaaagctggacttctcaaaatgtcaggtttctttatcagccttccaaccaatcactcagggatgcctttccttcctgggagatggtaccataggcttacattatatcatgtatggaaacatctgggggaaaaactcaactcccattaaaaaatatattttatatagccctgaaaggaaaacagtgaacgcccacaccactcacagctgagattacgggagtgtctctcccagcagctttcccatatgaagaaataaaaatcccaattcttctgcccattgttttatggccacatgggcttgcacaggaaatcaaggaggaattgtaaaacactgcattcacagagcttagtttcactttaccacacttgccacatacagatgcatcaaatcaaatcagaacaagatgtgatcttactgagaaagaatccttataatatcacgttacctccccctgaaaattcccccaagcatgcataaaatccagaagaccttaagtagaatattgaagagagcctttaaggctgaaaagcaagctgcatttaccttccttgtatcatattatatatacatattacaattatgtcagcgattaaaagcattgtcatgctgcattatgaactgtttttacgtttaggattagataattctttccccataccccctcagattccttttatgtcctaagggcaaatcctttctcttgggtcaggaatgtaataaggtaggttttcctctctctgggatattgtgtctgtctcactgtgtttaaattgattcagaaagctcttcagagcaaaatacagtattttctttgtatatgagccagcggttgactaacccttggggaattctctgtgttgagcatttgaaaggtacaggttgggtatgtttgaactgctgatgctcagtgaagaccactgggaaagtggattggccgtggctctgagagaggccttttctctaatgtggactcgaggaaaaaaaaaataattgttccaacaaataatttttaatggtacaataatttaggaaaattagccagttcattttaataagaatggatcaagaccaaaataaagagggaattatagtttatacaaatgtatgaacatacagtttaaaggcatttagccaccaaaaataaattttctaaaaacagcagttttctctccatccactgtatgaagtgttaacacatccctcctgagagttgaaccacaggccctgggatcaaaacagagcaaatttaccatttacactgaaggggactttcacttagatttggtatctccttccagaccaccagttagcagaggtcagacccattgccaaccaaggataactaatttaacccttgtaatgttggttactggttttgacagtgccccagagtctaggatcttggaatatgtatcaagtatagtcagagtatcaggagtacactgtgtgtgtttgtgtctgcatgtctgcatggatgctttcggttttctccctccctcccttcttgcctttcttctttcttttcttcatctcatttattttaatgggtacacagcaccccttctcttctgtgcattttctgtagcatttaattaaaaggcatttgggaaatgttctcttctgtcgaggcctttgactctctcacaaatgagcaaacttttagaccttgaaattgccacttttttcctcagctacatctacatagtgggtagaaagtttagccctgaattttgttcttatctatgccacaaactcatggtgcactattaggtaagcttctgaacccctctgaacatcaggaaaaccctcctgtgggagatgaggtgtgaggaggaggcagccaagtagaaagacatcggacaagcaggccaggcagaagagttggcatgagccaaagcccagtgtgtgcagcctacacaccaggttcctgcaaacagatgagagaagataaaccaggaaggagcataacgcaagcagccatgttcccacatctatgacggatggattcacatccatcatgggtggcaaggaccttaatacctatagcctgggaccaggggacacatcttgactttttgctaaacaaactatgctcctgatacttgtactgcagttgtgttacctgacaaatgaaatatacagacatcattttgcatgtactttagataaaataactaacaggacacttttactttaaaaatccaggtggcaaaatttggccgaacattgagtttcagttagtttcagtctggtttattttgcaagcgcattcattatttattccccagagagtgctgaaattcataaacttttaaccagttgctctggtataaccacactaaattaatattctgttcacatgcaatgtggagatcattatgaaagccacgtatatgtcacagacatgtgcctgaagtgtcaaatgaaagattttaaagacttgaatgattatgcaatatacaccggccaaatattcccaagaaaatctgcttataaaaataagttttatggaataaaagtaccaaattaaaaacatattttgaggaataaattagcacttcttgaggaatgaaattcttactttggtggggaggtaaaagacaaagcaagaaaacaaaattgcagaaatggctcaaattcaagaaaagtcaccctcccccaggagtgatttcaccatgtgaagaatggtgcttagcacaaggcaggctttcttcccagttcccctttggaaggaccacagaattttgcacacacacacacccttatttatttattttaaattgccaagtttaaacctgtgtttctaggtaaagtgccttctttattgctccaatgaaaattctgtaggaccaaccttacttcccttttttgactcttcaaacatgttagtcatgatagggggcaagatttctattccgtgaatgagatttccacaagcagattaaggaggaaatatgccctttagttttctattcgttgacagcattgcattgggaagaaatctctgtgcaaactgtccacaagaacaatagctaggggcccaaattccagtgagatagagtgcagcttaatcttgtcaaggataacttggtctttgtttttcctccttcatctgatgctttaatgaattatttcaagagaaacctacgataaagcatcagattatttttttctacagccagtgggacataacattgaaagttagggttaccatttaaatgccagaacccttaccccacagttatgtcaacattgtcatggtgggcaaaaataaattttaaaattcttttcatttataacaaataggagccaactaagataactctgaattatgtcatgactaactcagaaccccagtctaaaattatagtctgaaaggaggccctccttggtggaccctacaggcatctgtgatgctgaggtttatcagattgtggggaatagagcaatcacaggaaattgcttccgtttcctgtggcttctgattctcaaagcacaaatctaaggcaggcagccggttgggagtatattgaggcctgggaccacattggctccaaagcttgttgttttcaataacacatttctaataacacattcctccagcaagtatttactgagttcctactataggctgggcattgttccaggcacttggaacatatcattgaacaaaactgatgaaaatccctggctgtgtggaattcacattctggtgggcggagcagacaataaatattaaacaatgtcagtcagtaaattatagtgtgttggaagtgataagggccacgggaaaaaagggagagcagcagggtagggcttggagagttcaaggatggggaggttggacagtaagtggggtcatcaggaccaggatcgagcggggcgatgagtctctgtaaggaggtggcatttgaagaaggactgccagaggtcaagttatcctcgctcagtgaccccatcctagacgtgaccacacgtctccagctgtggatctctatgttgccagcctctggagggcattttcctctaaaaccctggctctgctctgtctcccttgtttcaggggtggtcaggtgtgcctccaggtcagtgtggtcctcgggtttcctctcactccaccttttttcttgccggacactttgtcacacatccagctgacttctggtgaccactcatctgtattctgggatgaggtcacagtctcacttttccagcaggcctccttgataaaaggctgttgcacagaactgaattttgcaggcagcatgggagaaacaaaaggttcaaaacaacaaactgcttaaaactcaagtgctatattgatttctatttgcaactccttagccccttccagcacagtaatttcaaatgaaccagttttcctgcttaagcccacactccaacatattgctagacattttctgtctttcctgtctgatccccccaaacttactggggctggcaagctaccactggcaaagaacttaatacttccttgccttaatcgcttcttttggggtcctccaaagacaccccacatgatgacatgctctgtcccctgccatttactgtgtcctttgttctctcctttactttctttttttgtttccctatctcttaaaataccggtctcgtcattgttttcaatttcttcctttttcatcctctgtacagtctccattggtcaggggttttcaaattgggctttgtgaaatctttaaaatactgtgtaggtgttttttagtttaccaaagataacatggggtagggaaggggcccacattcctgcatcagctgcagtctttcttagattctcaaatctttatgtccaggattgtcttctctgtgggatctctctaccagagatgtcctggaggcatctccactatgatatgttccacacagaagggtaatcgtcaccaaatctcctggccctccaatactgttattgtctcagatctttcaagctggagacttcggtatcacctgttactcctctctctaattcatcacccacaaattattccataatgtctttcacatctagccccttactattcatcctcctggctactgctgtagttcaaggtcacagctttcttggatgattatagcaactcctagatggattcattgcccagtctttgcttagtgcctctatgatgctgccagagttaccttttataagaacaaatctgatcattgccctgcttaaaacctgctcttggttgcctgggatctggttgccttagggcactcaactccccttataatttttccccaggctgcctctgcagcactcatcctacagccactcaccagcatgtgcacacatacacatgcatacacacacatatgcacagacacgcacacacattccccaatcctatacttggcaccattttccaacacattgtgtttttcttaacactgggcctctgtatctctcttcccttcttcctcaattcactttttcctgtgtcagcctccctttcttccttctgaattcagctcagttaccctgtttatgaaaccttcccttcttcactattttattagtgcctatcccattgtttcccattcaccttatttagactcaggcacaatgcctatgtctcatatatgttttgcccatggcacacaaatgaatgaatccctatagcctactgtctgggcttatgctctttctctaaactctatgccttctactaataagctaaagaaaattacaatctaggtatagaacatgtagtggatactcatattgcgtgtatggagattttgcttttatatacttagatgtactgttaatagggggtcaagatgtttaggagggtactgcacaccagggtggcttgtgaataaaagttgattgaaaaatgatagagttgatacttctacaggttgaaaagcatgccgaagcggaggggcttgctttccaccttggtttggtaggacaaacctggaaaagccctgggcaatgggcctgctagttttctatgatgtggggagcatgagtgaagcaaaagaatcatgcattcttctgagtagcttacttttaattgccaagcaaatgtgtccgtgcattgaaggctaatttttagacagtattcgtttctgcattcccgcagccaaccttggataagatccaatggacatgtcttattctgtcttgccttttcagtgttgagcacagtaactgtcatatcataaataagctttgagtgaatagtgaatgaatgcgtcagctcagcagggactgtgggcagatttccaaagggataattttgcctacttgcctgcctccttcctttcttccagtagttcttgagacgtgcctgtgcttctgtgatcagcaatcaccatccatctctacacacacacacacacacacacacacacacacacacttgccttaatctatttttaattgccaatggaaagttctcccagcacttaccgtgtaagaccctcccttagcaatgtgacgagcagtaggccttcagggagagccatgaccgtggatgtagtttggactgtggctggtaccaaaaacacttctctacctcccatcttcaaaagatttcattaaaacgaattgtcaacttttctcccaatattaaaaatactctctccaaatctacttgaaattcaaatacattttattgtaactatgattattttaacctatattttagtgatcaaaattatatcagaatttctaaacttgaaggccagttcaagagctgattgttctaatgttcagaatcagacttcagtgatgtggagggagtatggttgctttcgtagggcattgaagacagagaccacccattcaaattggatctcgtttttcatttacgttttttattttattcttaacttttgaattttcttggaatcacactgcatgttcagatcctttactagtaatacctatatgcttaggcttcatgtggattgctgaaatcataaaaattaggaaataaaggctaatgttctgtgtacttctagatactggtgctcctagtagcttgattttccaacaggaaaactttgtgcctacctttgtaatcaaggagactaaaaattaaatcttctctgttcttcttagggatagtcattgtgtgtgtgtgtgtgtgtgtgtgtgtgtaagcaagcattaatcaccctacagttaaaagtgcaaatgtactattataaatattattatacctattcgtcctacctttcaaagttttaataggaaaataagcattatgtttcctttttttttttttttttttttggagacagagtcttgctctgtcacccaggctggcgtgcagtggtgcaatctcagctcactacagcctctcaggtagctgggactacaggcgtgtgctaatttttatttttattttttgttagaaatgaggtcttactatgttgcccaggctggtgttgaacgcctgggctcaagcaatcctcccgcctcagcctcctaaagtattgggattacaggtgtgagccactgcacccagcccaaaataagcattattttgacaacaggttgaatagtaaaattgctattagtgtagagagaaactatccattaactctcttttctgaatctggcagaaaaccaagcccataggtgagggaattttaatgttctgggatacaatctggcttctgaaatccttaacttggatataaatgcaattgcaatggatggtaatgctttctccgtatgctggacttgtaggaatgatcgtgcataagagtgacaaattcatttgatccttcggagaggttgcatttatagccactttcttagctcctctggcctttctattttcctcatctaggagccagttgtggaacaggaaattgggatttaactgcacctcctttggggctagagctcaaatcagaaaccttggctcttaccatgtttgctggatttgttcattacagagatgaaatagaaggtgcctctttggagaatggttttccaaataatttcgttccatgactacacagttaaaataattttgcctatctgtgtttaatagtcttttttaaaagtatctctagaatagatactactgaatccttacttgcttaactctatatctttctttttggtaattaagcccctaatcaatttgcttaagaagagtttactggttttgttgtcatttggctgaaacaaagtcgatatttaaaaggatatggtataaaattaaatctgctcagtaacttgtagaaacgatgtgcacagagtcttagaatagtttacacacgtcactttacttctccatgtaaaatcacaataggacttaaatacaggccactccaggaaagaaactctgagaagctctttaacaaaaggcaacttactggatggtaagagaagcctcttaagagacaacagttacattttcgttttagtaaaataacttagaactcagaaaacaaaattttaagagaaggagcacttttatagtttctagaaggaattaggggcctgtcttagcctgtttctgttgcgataacaaaatatcttaacactgggtaatttataaataagagaagttgatttctcactgttctggaagctgggaagtctaaggtcaagacgtcagaagattcagtgtctggtgagggctcattctatgccttatagctggagcctctggctgtgtcctcacacagaaagggagagggctccctccagtccctttataaggtcactaatccctttcatgagggctctgccctcttaatcacctccttaaggccccaccccccccccctttttttttttgagatggagtttcattcttattgcccaggctggagtgcaatggagtgatcttggctcactgcaacctcctcctcctgggttcaagtgattctcctgcctcagcctcccgagtagctgggattacaggcacctgctacaatgtccagctaattttttgcatttttagtagagacagggtttcaccacgttggccaggctggtctcaaactcctgacctcaggtgatccacccgccttggcctcctaaagtgctaggattacaggcgtgagccaccgtgcctggccaaggccccatctcttaatacacccacactggtgattaagtttcaacatatggatttcaggggtgacacattcagaccatagcagggcccttaaggcactttgaagaatgaggatgtttccttttgacctaaataatataaataacatcaaccaatattatgaatatttacttcttagaaactcttctcaaaaactcacatttccttcagtttttaggtcacgttaatattaagtcactactgtgattctatttatatgagtttgagcctgcgacatgtgcattccttagggtagggtggagggtcagctagataaattatgtcacaaattttacatttatacctagttattatataatccaaggtaacagcaaaactgaaaagatagagattctgaattaacagtgcgtcaatttttcaagcatctttagtaaattttagaatatatcatggattagaaactatctgctttttcaaatcatgcactattttgcatacttgaactgatgttagcgtatgatgttttttggctttgttctgttaacaactctgcacaaagttcaggtttctccatctttccactcatctctacaacttggacgatgaggacagaggaatacagagaagtcgtcatttatgtgaggttcccaggttattaactgaggccagtaagaaacccactggaaaatactgtatcataaaaatatgttccacagccgggcgcagtggctcacgcctgtaatcccagtactttgggaggccgaggcaggtggatcatgaggtcaggagctcaagaccagcctggccaatacagtgaaaccccgtctctactaaaaatacaaaaattagctgggagtggtggcgcatgcctgtagtcccagttgctcaggaggctgaggcagaagaatcacttgaactcgggaggtggaggttgtagtgagctgagatcataccactgcactccagcctgggcaacagagcaagactctgtctcactctgtctcaaaaaaataaaataggttccactttgactcaacccatctgtgtgtgtgtgtgtgtgtgtgtgtgtgtgtgtgtgtctgtgtctgtgtctgtgtatgttgtagcagaagttgtgattaagatgcagtcttgtgcttccatggaaaaacacttgtcgggccctaccccagtcagtctgaaggagaggtgtagctctggggaagtcagattccattctacctggctgttccttcaaccttcttcctattctcccacaatttcctggtaccagacttcatcaccaagtatacttttgtgagtttttctttggaggcgtggggtgggggtggggggtaatatctttattgagatataatttatctaccatgtaattcatccatttaaagtatacagcaattcgtatgttttgatatattctcaaagctgtgcaaccaataccacatgaattttagaacattttccttaccctacaaagaaaccccatacccttttgctgtcatccccaatttctctattcacccaccttttttaatatatagatttacctattctggatactcatataaatggaatcatgcagtatttatcttttcttggactggcttctttcatttagcatgctgtcaaagttcaaccatgttgtaatgtgtatgcgtatttcattccttttaatagacttttgtttttaaatgtgaaatgatagtgttctgctgcagtgaagcatagtccagctttccttggggaggtctggggaggtgatggggtggggtggggtgggggtcatattttaggttagttcatttctcttcttcagatccaacattataaagccctttgttcagataaaacatctaccttgttaaagaactttgcctttcttacacataagaaaaaataattttgttacacatttgtacctaaaagcaggattcaaataacagccaggaagaagtccatttatttattcatttttaaccaagaagcgtatttttttatctcgtcctaattcttaatattcacaaatcagaaataagaaattgctttatttttataaagagaatgctggtttgtacccaaagtcttgagtcctctgggtattttctggtataattttatagttatgtcagaaactgaaagatgccttgatatttatattaaccagtttgaattgaaacaggcattttgtgaagtctcagggagatccctcccacagcagaggctgtttcaggtttttaaataatctgttaggaaggaagattgatgggtgccaccaaaacaatttaaattattttatttatctaaaattaaagtgcacattgatatataaggcctatttcagtcctgatagtctgtgattcatgtttttttctatgtctgcctagtgaagcatttaggaatccaattacaaggtatccccaatataatccacatcatgacagttgtaaaactttcaaaaatgttgcatttatcaagtaatacacaaaactggagggtatagaccttatttcaggcaggaagttttgagggattcttgtggaaagtgtttttttaggcaaaacatttcagtctttcttgcaaatcagttttaatataaattaaattttaatagattctaaattattttcccatttttttcttttcagaaatatttctggactactacctaaagagtaatactacctaaagagtaataggcttataacataaagtcaagaaacactgaaaattgagcttacttgaaatagtttacttctttatatcccatcttatgtcaaagtagaagactttcttaatatctttccccagcaaatcccacagaagtttcaaattatcgaatcctgttcagtgtattaattaactcaagctgcatttatgagctcacctggtagactaacataaaaagattttgaaactatcaaacatttccagtttgacattctgagaagagaatgtttcagttttattttctgccttttaaaaatataatcaccgcaacaaatggtggcatcttaatggttcaagagagagaaatgtagcaaaggcatgaattggaaatacaactgggggtggagcaagtgtgctcagccttccaccagtgactcaccagtgaacccagtgaactaccagccagaaaggctgttccattttcttagatgtttatatatggaacacactgctttctaagcccttattctattttctatgaaggccataacaccacctgtgtgtgcacatgggtgtttgtgtgtatgtgagagagatcatatgtatttgaaaactatgaacatatattttgcttttacatgtagcttgtgttgtgatgaacttggcgtcgtaccttgtagaaatcttttaaattgataaagcagttctgtgggatttgagaaacattagatactgacagaaagactggcgtgaaaagtacatgcgcaggggagctgtctggaaactggtgagggttgagcctgaagcttcgcgtttcccccctccactgtttttagcaatgcttaaaggtaatatttttattacaacagtggaattcaccttcttgatgttaagaaactggctgatgtaaagagtggacagacttttgaggcagccaggtgtgtatctatggattagtgattccctcgggcagggtttgaatggggatgtgcagatcttgcacacacacatttgagccttgtggtagcattctgaagaagtcacttagaagggaggacacttatcgatccagagaactgtgtttctgagtgggaattggtggagaggagactgaaggaaagcagaagtgtacttcccagcctcatgagctgcgtgaacggcggctttatttggagagctgcgagccatggactgcatgtgtcctttcatctggagggttaggaacagaccaagggaaaactgcctgctctgagctaatagtgaaataacaaagtgagaagaaaggaccctgattagctcagtaaagtccattgtggcatctattttgctgctagtgaaagaaaagcttcactttcccatttcttcctgtagctctccaagcctccttggtggacatccagggctcggcttcccaaagaaactccgttaaaagaaagaagcaccttctgcctccttgattgctaaaccagcttgtgatttctcccacctttctatgggctcccggagccccaaaggagtggaagaaacagtggaagaaatactgagtcgtggctcattttgctcccattcgatgacagttaaaaaaacatcatttcattggtttgctatgggctcatgaggtgttcacttcctcagtcaccagttccctaaggctaatgcttggagccccaattggaaaactgaagacatggacccatcgggaagctcagtgtcgggacttggcttttctggggaaatttcctggtcctgatgtcctggccctgtttattcagacagggagagttcagagtggctgcgccgagagagttggcatgccacattgtaatttacaccatctatctctttctgactctcgggcctctggcaaattgcatgtctatgtgttggattagtttggaatttaatcatgcattattttccctccaattaaattatttatatatttgattaacgttttcactgctgggaagtcaaattttcaatgaaaccacaaataaactcgtgcccattgaatttcaggccagcttcatatggggtcaattcgtccatcgaatgttaagaattcattgcctatcacttttcttatctaccttggattttggtgagaaaaagaatgtgtttttttttcttagtcctaggaatatgatacaaacagtgaagtttggcctaatgtatggccctcccttcgttggggtaccttttatagcgcaggatcctgattttcagtccttcctactgccttttcttttctctggcactagaacgtacctccttctaattttgctttctcaggcttgagggctcacctgtcagatgttagtacgagaaggaaacagagctcatccactttggggattagcagtcaatggcccataggccaaatccagctgcttgtttctgtgcagcctatgagctaagaatggtttttagactttttaaaagttgaaaaaaaagtcaaagaatattttgtgacacgtgaaagttttccacattcataaatgaacagataacccattcatttaaatgttgtctgtggctgcttacagccctgtaaagcctaaaatatttactatctagcttttacagaaaatgtttgccaacacctgatctaattcattactctaattttacagatgagaaaagtaagggccaaataggtgaattggtctgtccaaaggtacacaactcatcagaaattgtctggaatgcttcctccattgccctccagtgctctgcctactgtgatataggccctcagatgaacactcactgcagagggcaatgtacaatgtattttcttttttttttttttttttgagacaagttcttgctctcccaggctggagtgcagtagtgcaaacctggctcactactgccttgacctcctgggctcaagtgaccctcctgcctcagcctcacaagtggctgagactacaagcctataccaccacaccctgattttttttttagacatggggtctcgctgtgttgctcaggctggtcttggagctcaagtgatcctcctgactcagcctcccaaaatatggggattacaggtgtgagccaccatgcctggcccaatgcagctttttaaaggaaagtaaatatttagaacacatgcacatgttaagtctgtgagttcttagaattttaattttcacttgaaatctagttctaggaaatatgttaagcttaaaatacatttgaactgcttaaacaggcagagagatgcctccctttttccttatagcaattgattacatcctctgtgcagcatttaagcagtaaagaagaggaagattgacttggttccccagcctcctaggtgtagaatttcatttaaagaaaaataactgtggtctcaatgcaagtttgaacttaagagcagttccagaaaattgcaaaaatatattagttgggactcgggtctaagggattggaaagggaacattcccaagatgctaaccttatgaaaatgaggttgctttaagtgcccaacataagtttcccccacccctccccacatggagacaacagcaagggtgttcatgcttgctgactggtgtgggatttcctgccactcaaatttccacacattgtctcagtggcaaaggtagaagaagctgggtgcggtataaataggaaatgattgggatttttccaggcactgccctcctccgctggttgccagttctcccttctctgctcagtgccggatccctcaacaccattgtaggcagattctataccttccccgtcactttggataactaaagtgtccaatttaaacgtccaatctcaggtccaatccagagccttcccttccctgtcagcagcgaggcacaggcctcaagggaactggcaggctgtttgccctccctttgccacctcacctaaaggagctggggcctgggagtgctgccaggagatgccttccctttctttctagggtccagctcctccagtgtgttggatgagacaggaaaggaaaatatgagagtccctttttttactggccactgttggcacctccttcttagccacccctgctcccttgagtagcaccaggtttccctgatgccctcctcttcaggggcagacatgcaagcctggctttcccctggggtgtatgtgagttttatgcaggggtatttcccacatcctcactgctggagacatgactgagcacacagcattttaggtgagccctggcaagctaacccaagcttacctacgtcatggatgtccacttgacccacagaaaactcatgccttctcgccatgccaagtggtggcagtctctccctggccagttctctcctgccatgcgtggccctcacgctgttcctcaaaggcaccaggctctgttcttctgcaggtacttctgtgtcatcggtccgctgtagtgtcccattctcctaccccatccttccctgcacacctgatgtgtctactcatccttcaggtcctgctctaaatgctgcttcattggagaagcggaccctgattcctgatgctgcacactgacttatgatcccattacatgtttttataaaaccctgttatctcccttcataatgcctatcacaactgtaattgtatagtaatttaagccatgacctgtttccctctggtagacttaattccttggggcaagaatcatgtctgtcatgttctccagcacagggcctggtgtgagtggcacccagcacatcctcataaaagcatgagagagaacagggaactaataagacatggatccaaccttaagcagttggctcagcacaaattataattcagtttcccaattttaccttttcctttctccctcctgtgttccttccttattcttccctttccttctgtctccctcactctctgcttgccttccttgcttcctccctcccttccttccttttttctttccctttcatatgcattaatccaaggatccaagctttatttccaatgacttggaaaactgaaccaagagcaactgttagggagtgtttttgtatgatcatttctttttctcccgtttgagaatccatagaacccctctgtaagatgtgagcttggtttccaaggctgggcttcagcacacatttgggaaagccctggtcttgtgtatgggctacaaagacttactagaagcagacgtgcggattgaacgttgacccctgtccagaacatctgttctcttcctatacctgtgtgcatcatcataactttaaagaaacactgacatggagcatggctggcttttcataggaaacccacatctgtttgccgtggggttgctccccaaccactgcagtttctgtgtcatttttggagctactgacgggacattggctctcttcttgtgtgctgcaatgtaccactctctctctgctcttcatcagatttttctgggaactgctccaaggagaggagatagagaacaacaatttcttttctctgtcctcacccagttttaaactccagaaacagcatagaaaactttacttttgtaaaacttttttttacctaaagcgaaaggccatctagtggagtaactgggaaaggcacactctgagggcagaacttcaccttcagactcacagcgaccaccgctttaggagccctggactcagcaggaaagtaatgagaggttgtgtcactaccacacgaggcatggagccaaagggagctttctcttattgaacgaagttttttggtgatgtagttctatgtatacttcagaaagtgttcccacaagccttaaattaaggcaaataaaatgtagaatcaccagaaaataaagaccaacagcatcaacctaggatgcaaatgtcttcagtagtccatagctggacattgaaatagtatgctcaacctgttgaaattgaccttaatttgattcaaattaagaagcttctcttcctctcatgctgcagtaggtttctaatgattcctaattgtattaatccaagaaattaaatgattctaaaaccatgaattggtaagtaattcagagaacttcatctttatgttaaaaactgtattaatagaattttagagctagaaagtcccttagcaactagtgaatccagtcatttattttctacaagaagaaaaccaaggccctgaaagactaacttatttgttgatgaccacacagtcctcttcctcagtataattcttttctctgcaattcttattcaggaagcagtctgattaaccctgagctaaagtttcatttgcaagtgcttttggtttttttgttctggaattgtgcatgtctgtgtgtgccttccctttttgaagcctaagccgcggtgctaacccatggcccagcatgtgagagttggagaacatctctgcagttgtttagcctcaatcgccagccttggcaaggaaaaatgacagagattcagaaaggtcaacagtggctcacctcatttcataactagctggtcccaaacctggaattgaactctgctcttcagatggccagtgtactgtagtatatttcctggaatgccaggctccatcccggtcttgccactcccactggttaggaagcatgcatacacagttagcaaaagcaaatttacttgagaagtgtactaactggaatttttataatctgtaatatggtaaagttattcttgtggtctttagaatttttaagattggggtattttctgcattttcttctgtcgccttcagaaatgatgaatacgtttccatttgatttctctctctttttccaaaccccagcatataaataacgaccatattcatggagagaagaaggagttcgtgtgcaggtggctggactgctcaagagagcagaaacccttcaaagcccagtatatgttggtagtgcatatgagaagacacacgggcgagaagcctcacaaatgcactgtgagtacagaagtgggtggcaggcacacttgggtccttccccatactcataagagctgtgcaaactgatgacaccagctcaggggaagcgtggttgggtggcaagagaagaggactagagtattgtctggtgataaatgcctcggtgtttgagtgactgagttggacagcgcagctctgcacagtggcaagggggcagtggtggctggcactgggaatgaatagcgggccaccctgctggccgcagcccaacagcttatggtaccacggggcttggaaggcaaagggaagtgccagcttccaacttacagagttgaagttgacttttaaaacagctaatccctatacgaggttttaaagttttcccttcctttcctagtgagtcctcaggcataggcgtatggaatgggaagggggtgccgcaaggttgtgcattcttcactgaggtgcccacgaggcgcactgggcacgctgagccctggtactttacatcttaaaggccctttacaaacatgatcaaattccatgtctttgtatggacacaaagctatattaatgaactttgtgctgaatctgaaatcagtgggaatttgaggagatcaatgagcagataatgaaacccattgtccacattgagcggtctattaaaaaaaaaaacttcaggacttttactggcactgaaaactctttatctggaactacaccaagctacatctgaatcccaataaatgcagagtttagtggactttttgttcctgggttttgaaaagctgctgacccttgaaacatcagtttttcatcaacttggagggcgtgttaggcataagctgctgttgccattgtgcagagtaatccagatttacctgttgtcctcagtttgaaggttgcacaaaggcctactcgagactagaaaacttgaaaacacacttgagatctcacactggagagaaaccatacgtctgtgagcacgaaggttgcaacaaggctttctcaaatgcctctgatcgcgccaaacaccaaaacagaacgcattccaatgaggtaagcatcctcagtgggcatggagcttgcataaggaaacaaagaactatcccggggaaggcacatgggaaggcgcagtgtgttctgttttgttttccccttggccattcccagcatgaggggctctgcccctgcaggtgaaggcttgagcttcctaggtgggactggaaactggatcttatttggagaataataagagatgaggaggaaacttcttaaaacccctgcgaacttactagtttcatgttgttttgaactgccacctactggtcaaacagtgggagcatttgacttggaatctgagccagtcacgctgcccaaaatagcaggaatccatgcaaaggatgaccccataagccccaaggatatattaagaagtagcatgttgacagctgacagcttcctgctaagtcatccacttttatttgcttcctccaagtggtatcttcaaatggtattatatcaaaaaagatttttacagagcaaccagccttggctaaatgcaattttcagacattctaaattccaaaggatcttggaaaatggtctcagaaacccagaatactttctaggcagttacttaagaaaacatattgagtaaagcttcagggtgattcctgttgtgttactgttatttttaggtagcgatcccccctaaattgtagagaggcataagaataaaaattattccaaattcattgcttacattttagtgaacatcttcctacagacttccaatttggccttggaggtctagctcaaattctggcttgtctgtgaaatcttctcttgaatgtattgagagattaacaaaaggactccccacattttgagtggaaataggatagctaaccagaatttgttaacatgagacatagttcagcaccacagcgtgtcatcagtttgcttgaaatgtgttagagaaggaacatcgtgcacacatgagaccctggagtggctgtcatttcatctcaccagtgcaggtcaaacacattcatgatctttcagacagagagctgggcagagagaatcttgatagaaacaaagtgagccattctgctcagtggacttttggctttaaggtggcaaagatggttctcaccatgttttcttcagctgaaactgacagagcaaaaacatctctaaagggattaactgcactctgtaaaaagcacactcactcataaactcacacatgtaagttcatatatataccaactttctgtgtgaaaaggtcatggaaactggagttattcggaatctcattttctaactgtttgaagacattttaaagatgccacatctccatttttaatgtaaaaatgcttttacagtatgcagtagctggaatataatctattacacttgttttgtacaaaattttagggagtctagaatagatagatacatagagatagaaagtagatcagtggttgccaaaagcagaggggagagggaatagtgatgactgctaatggatacaaggtttttttgttggggtggtgaagatattctggaattaggtaatggtgatgattacacaatgtctagaatgtactaatgccactgaattgtgcaatttaaagggattatttttatggcatgtgaattatatttcaatttaaaattttaaggggttttgacttaacagaatgtatttcatatatttcatagatttaagtgtaattttgactagaaatttagggggcattcattcctatagatgttaggccaatgctgtctcctattatcatggagaagtttggacagagggtatgttaggatcagaatgcacacatataaagacaattaccaagcttttttgtctttttatggacctaaaatatttgtacatgtctgtttgctttaattgtggtgtagttgagcttgtgttcttctccaaggtaaaaagtgcaatgttgtgtgagagttgagtgtttgttataagattaaaagataaggatatcttgggtagtaatgtcattgaccacacttgagcaatttacttaaattactaacttttatcataaatacataattaaaattctacccacagacatatttacaaacaaattatacttctctcttctatatgcaagactttggccctgtgtgtgactgatggacattttcagacgcatcaaaactaagtttgtccaggaaatccagatttgtgcaatttcacaatcctagatgaatcaagtgatttgccttcatttatttcctctcttatttgcaacttcatttattcattgaacaaatacttaaagctatttatgtgccaagccctttgctgttctaagtgtggccaagaaaataatggactgtaatgggaagggagtaattgctggcacttctctgttcctctggctgtcctgctcatttagggctgctagactgaccgtagctctgacaggacttcttactccagatcagacagctcatttttcccccaaagataccgctaaacaagtttcctgagctctgattcggttgaacctccctctctagaaagctgcaatggctccctctttcctatagggagacttgagactccctaaggttgtgtaagtgtcagttctcacagggcccaagctcatccctctagtcctgacctctcactatcatgaccatgaatgaaaccttccagaagctggtgctgtgcactgccatgcttaggtgcatgaagtggttctgccactggacctttgctgaggacacttctttttggcatcccaagtaaaatgactcctaataaaagctctgtatattgagtgcttactatgttccatgcatcctggtaagcacttcatgtacatgatctaatttagcacttactgataatcccgtgagctgggcattaagcccagatatagaatcttaataactgatgcctcccatgattatcctagctgaaaaatgatccctcctctgtctatatccttacatagctttcacactttatattacagatcattgcatcttcttatttttcctatcagattttgtattccttatgattaaattttgttgtatgcaactttgtgcttgcagaatcttgcacttcagtaagtctgagaacatttttcttagtctctaattatattttatttcagtcactgatcacaacaaaatttgtgggcaaaagttgtgtgaagggttaatatattttgtttatgttatgttgttgtgaggtatacatttcctgaacctgtattcttgtgaatttgtgaatttttgtgggtagataatgtgtatgttcacacacaagggcacacgggcacaggtgcacctgtatgggctgttgtttctggaagtgcaggagccgacacatttgtatctcattacatattggctgcgtccttggttctaagctaacccataatgtacatccatatatttacaggaagagtagctctccaaacatgcaggctttgtgctccctctctccttctggtctccatacctctgccccatatatcccagtctgcctgttgatggaacaacctgtcacaggaatgctgtgagcaagcatagggcctgtgtcagaacactgtaaggtaatggcactaattatcagagccagtcttttgtccctaatgcatagaatttgatgtgctcatcttattatatatatatatgctgcaaatcacacaagctcctgaatagatgtaattcatagttaatgggaatcaattctgcccaaaggagtctcaggtttggaggtgaaacctctcagtttcaggatctttgcttcactgcattaggacatttcagcattttaggtagcactcagtctgttcttgggcttttagtgaaaaagcatcttttagacatacattctacaagacacggcatccttttaaatataataggtacattatagtaatcctgcttttcatgacgcttgcttacgtaaaagctcatcctctgctatacatagatataaatatatattcatgaaagcattcttgcgtatattatattttaagccaagtgaacaaactcacaaatccgatgttggtcatgagccaaaggtcagcagttctgtgatttcagaaaataatccgcttatataagcatccgcataattttttatgactgtatccttaggcttgatcactgacccacatagaaaatgaaattagcatgaaataatttatagaccttagttataaattcactgaggagaagaaaacagaccagaaatcctggtccccagaacatccgtcagccctctgcagtttatgatgaggattcatggacagtctgtaacagggctttccaacttcaaagagcagaaaggttctggctattttgagccctgaacatccccacacttgtaatgctacccaaaggagcacattttagtgtcatctaacatgggagatgccatcggcaatttttaaattatgcctgtgcataaatagcacattttcaaaaggatcagagtgatattagatctcacaaccaggacatccataaaaaactttgtcacacaatctcttctgaaaggtgtgcagtcttctcctgattagatgatgggtgtcttttaagccatcttcatagtcatcgtcatcatcatcatcatcatcatcaaatatctattgagtgcctattatggcaccgtgatacttctcactcacagtgtaaatgcttccaagaacatcaaggcaatttacacattcttagttctccctgagcctctctctcaagccataatctattaaagctaaattctatggacacggaacagtgttctaatggccttattaaactattagttcctagaggtatctgaacacctcaaagccttgtgaaagtgttttgaaaggattaaaaatgtaatgagcaaccataaaggacttttgggctggggcatagtctctttcataacaatctcttacctcgttcttgtgggatttggcagaaaccatatgtgtgcaaaatcccaggctgcactaagcgttacacagacccaagctccctccggaaacatgtgaagacagtgcatggcccagaggctcatgtcaccaagaagcagcgaggggacatccatcctcggccgccacccccgagagattccggcagccattcacagtccaggtcgcctggccgaccgactcagggagcccttggtgagcagcaggacctcagcaacactacctcaaagcgggaagaatgcctccaggtgaaaaccgtcaaggcagagaagccaatggtatgtcattcactctccttctgacttcacagcaggcccatttaaaagagccaggtagggtgcatagagggacaggacttcccggtcctcactgtgtcaggctgtctctgatctgaggaggcgatgagggcagtgacccgtattgcttacgtgaagtcgatcagctcagaaaaagagtttccaggtttcctaactgatttttaaaatccctcccagaaccataccactgtgccatggaaggaagaaagacacgactgtctgtctctccagcgtgtctgtaatgtcgaaaatcattcattgactcttcctgtaaacatgctttctgtcttctttgccctggtgaccccaaggtaaataggccatggcccatattctttaggagtttacagtccagtgggatagatagactgaaaaacaaataccgtgcagtgtgatggaggcttacacacaagtctgtgtaaagaggattcaggagagggacggactgccggtcagtcggggcagaggaagccatgggacaggagttcagtgctccagagggaagagctgaggaggatgaggaggcagaggagcacaggggtgggaggggaacagcatagcaggggtgagtttttttgtttgtttttttgttcttgttttttgaggaaaccactccagtaccagtctagaaactgggtaaactggagaccacttctgcagttgggcctgaaccagtaaggcagagcatgagagagggatctggaagattcagtaggcaatctttgtgtttggagactaataggacatgtgggctctgctactctttcagcttctttcaaacctcagttcgtgacttcgcttcatgaatgtgattttataaaacacctaaaaatttcaaagacaacaagaaaaattaagagtagatagtatagtagaggagattcagcccatctggccatgcgtagaatggatttaattgtgcaaatatattgggttctgggctgtcactctctaacctgtgaaggaagtgtaccagagagaagtttcatgctcagactgccggatgcacggaaacaatcaggcaaacagatttatacttaaagccagcattttcttaaaattagagcagtctatcggatggagagcctatgaattcatgagtgatgtcacagtacgtgtgggtgggaaataatgcacaatcttaccattgagacggtgagaagctatgttttaatgacttactgagtttgtctttgaattcttaagagtcttagagagtgacattaagtctagccaaaaataacacaaatcagctatgcagatttatcatgatttatcagtgggtagctgtactttgctttaaaaaagtatcttaataagatgtttatacattatggttgatcactgtattttaatcagttcataaactgtgttttatatactttttttgaaggggagcacatgtctattcttaaaataaagcctacctgtataataattgtacagaacattcaacggtttatcctcacgtgtttaacaaaacaaagaaagttaatttgcagtcttagattatgtcatgaaaccgatgatttatattcttgggatattccaagaacccaaaatctcttctacttttagtgtacattcctagctcaagaaaattgtcattttctcttcaaacacccattgtttaaaaagaaaattggtagaaataaaaattacagcgatttggctcagcaacattgagatgtcccaatgtgtgaaatatttcataaagtaattcagtcatattaggttggtgccaacgtaattgtgggtcttgtcattacttttaatggcaaaacccacagttactttggcaccaacctagaaccataggactaaaagaaaccatggagatcaagactatgcccatattttgaggaagctgaggcttagtgaggttaataaattaatcacatttccacagcagatattatgtgtgtatatgctcacacacatttaaaagtaggtatcttcacagacatttactaataaacatgaaatttacatttctagttttctttaaaaaacatgtctttgatttgatcatcatgctataaattaaattctttcttcttttttcttattaatgcaacatctcttctgtctaatgctcctaaatgtcttgttctcacttcctaaggacagtgggtaataaggtgagggaattttggcttctctgtcctttttgttttgttttcatttttttaacatttacttttttctgttaatttttctttagtttttgtggttttgtgatacttttggtagtgaacattactcagatatgtttcaaatatagaagcaatgtgttttcaacattcagcatgtgaaaaatgtggagttagttggtgaaattcattgttctatctgtctaggtttccataacaaatcacactggggcctaccaagcagatgttctgaaagactcattattgtactgactaatgcaaattcatccttagaccagatgtgcaccaccttctttgaggaagatctggctttatttgttgttagcaatgtaatctctatttaaatgtggacgctcattgaagcaatttcctaattgtgagtgcatttgtgccttatatgaagtgtgtctgcctgtgtgtttgcacaaatgcacaagttcatgtctgcacacactctgatttgacagtccaggagtcaaagacatccaaaactctggaaacaagtacctcaggaaggagcaggtggtctggcactccagcactctgctgaggccaaaaattaagcaaggcttcacatactcacgatcaaatttgtataacttatttggctctgcttggttgcccgggacaaagttagtgtaccatgcagcactcacttagaaagtgttcatttgcttgggtgtatgtaccatgatagcagaagaagtgaaagggttccactgcgaagagcccttcctggtggcactgtgcattccacctgagactacagtactctgtaaccgagtgagtgtagttatctttccctaaagcactctccctttcggctgctgtccgtgtttatagtaacactggtgaaggcgctgcagacgcatggaagtagccggcctaggagtccaggctagttgcaccattcactttgtgactttgggcagtcactaaacttctctgaacatcacttttcttatctgtacaaaaaggattcgactgtttatcaaccaggacaccgctggaacttgagatggaacaattctgtgctgtgtgactgtcctgtgcattgtaggccattttatatagtaatccccagatattgggcaccctgaatttccaggagccctgggagcgagaggaggcagtactttccctgattgaggactacggtggactagattaagattccattgtttgcagcattgtcttatagagtctactcggttggggttagggaatcatttcctaatcctcctagtgaactattagggagtacactaaggagaacagtgaaatcattctacagactcatgacggctgtgatctgcagcctttctttctttctttctttctttctttctttctttccttctttctttctttctttctttctttctttctttcttctttctttctttctttctttctttctttctttctttctttctttcttggtatagcacaagctaagtgattgaagttttacctctctcaactgcttttactgacaccttggttgaggttctacaaaagcaagaaaatgtggaaggagggaggagaggttacaaagagcttggctaaccagccctgaacagcctagaggggctcttgttggaggaggtaatgtgtgctgatggcgcatatcttacatttatgtttcagctgagcaaaatgaacctcaagactaaaaccacccgggatcataataattgctaacatcctgtgaaccaattgctattatccaggtctttttatacttgtgtgctctctgggcttcacacttaattcctcacaacaatccctgaaataaatggtccctgttttatagataaggaaactgaggtttagagtggctaagtaatgtgcccaaagaataaagtggtggagatgggattggaaccgaggaagtatgtctgcagagttggcgattggggcaggattccatggctgataccatgccagtcacactgcagctagcattctctgctttccattgcctcctgttgcccatcagcctggtggtccatccgtcattctggccaaaagtggccagctccattcaccagaacatagtttttcttctcattcaaccaactgatgatcttgaagatctcgatatgcatgagctctcattattggctccctttccttgaccctccctggtgacatttctttcctttccacttgaccccaacagacatctcagccaagccctggtggtcagtcttcatgcagcagccaacagtcccccatcagcaactattccaacagtgggctcgagcttcctctgaccgatggaggtagtataggagacctcagtgccatcgatgaaaccccaatcatggactcaaccatttccactgcaaccacagcccttgctttgcaagccaggagaaacccggcagggaccaaatggatggagcacgtaaaactagaaaggctaaaacaagtgaatggaatgtttccgcgactgaaccccattctaccccctaaagcccctgcggtctctcctctcataggaaatggtgagttctacatcagaccatgcatctgctcagggtttttttttctgttcttttaaatgcaggccctcagttttatgtttgctagtttctccaccagtcctaaaatgacgctgtaaccatccgttaatgtttagcccattcaagttgccttttgggattgtccatattttaaaaacagctaggaacaggataatattgagaaaaaaatgtgactgtgcatgactcatattctgatggtgaaatcataactgttagattagggtaagggaatgccagcagtggaggcatctgtggttggaactctgtctctggtttccaaaatttaaaaccacgaggttagcagccacttttatttatatttacccagttcaaggaaagtcagaaatccctccccactgtcagtccccaggtcagtttgcacttctgagattacacttctgagagcacctaaggggtgaagctcttgcctgcaccaacacaggtgttacctgttggtaggatgtggcatgaacaggacgccctgagcgtgaatgtgaaactcgtggagtacctttgcctggggacttgcctggaactcaagcgttgtgtaccatcacaagattctttttgtccttgcacagcgcttggggaggggcttcagtgaatcgagggagttgttattgttttgtttaagccaggcatcagcaaactacagcctgcggccatctccagccgcccctgtttttgtaaaggaagcttcatggacaccccgccacgcttgcttgctcactgctctctgtggccgtgttggggctacactgcagagctgagtagttgtgaggcaggcaatgtggcctgggacaccagaaatagttcctagctggccctttacagaaaagggttgctcatgcctggtgtaagtcatgctcgaagggaattcatctccgcatggtctctccctttctctgtctccaggcacacagtccaacaacacctgcagcttgggtgggcccatgacgcttctcccgggcagaagcgacctctctggggtggacgtcactatgctgaacatgctcaacagaagggacagcagcgccagcaccatcagctcggcctacctgagcagccgccgctcctcagggatctcgccctgcttctccagccgccgctccagcgaggcgtcacaggccgagggccggccgcagaacgtgagcgtggccgactcctacgaccccatctccaccgacgcctcgcgccgctccagcgaagccagccagagcgacggcctgcccagcctgctcagcctcacgcccgcccagcagtaccgcctcaaggccaagtacgcggctgccacaggagggccgccgccgacgcccctgcccaacatggagaggatgagcctgaagacgcgcctggcgctgctcggggatgccctcgagcctggcgtggccctgcctccagttcatgccccgaggaggtgcagcgacgggggagcccacggctacgggcggcgccacctgcagccgcacgatgcgccgggccacggcgtgaggagggccagcgacccggtgcggacaggctccgagggcctggccctgcctcgtgtgccgcgcttcagcagcctcagcagctgcaaccccccggcgatggccacgtccgcggagaagcgcagtctcgtgcttcagaattacacgcggcccgagggcggccagtcccgaaacttccactcgtccccctgtcctcccagcatcaccgagaacgtcaccctggagtccctgaccatggacgctgatgccaacctgaacgatgaggatttcctgccggacgacgtggtgcagtatttaaattcccagaaccaagcagggtacgagcagcacttccccagcgccctcccggacgacagcaaagtgccccacgggcccggtgactttgacgcgcccgggctgccagacagccacgctggccagcagttccatgccctcgagcagccctgccccgagggcagcaaaaccgacctgcccattcagtggaacgaagtcagctccggaagcgccgacctgtcctcctccaagctcaagtgtgggccgcggcccgctgtgccgcagactcgcgcctttgggttctgcaacggcatggtcgtccacccgcagaaccccttgaggagcgggcctgctgggggctatcagaccctcggggagaacagcaacccctacggtggcccagagcacttgatgctccacaacagccccggaagtggcaccagtggaaacgccttccatgaacagccctgtaaggccccgcagtatgggaactgtctcaacaggcagccagtggcccctggtgcactcgacggtgcctgtggtgccgggattcaagcctcaaagctgaagagcacccccatgcaagggagcgggggccagctgaatttcggcctgccggtagcgccaaatgagtcagctggcagcatggtgaatggcatgcagaaccaggacccagtgggacaggggtacctggctcaccagctcctcggcgacagcatgcagcacccgggggcaggccgccccggtcagcagatgcttgggcagattagtgctacctcacacatcaacatctaccaagggccagagagctgcctgccaggggctcacggcatgggcagccagccgtcaagcttggcagttgtcaggggctaccagccatgtgccagctttgggggcagcaggcgccaggctatgccgagggacagccttgctctgcagtcaggacagctcagtgacacaagtcagacctgcagggtgaatggtatcaagatggagatgaaagggcagccccatccgctgtgctctaatctgcagaattactctggtcagttctatgaccaaaccgtgggcttcagtcagcaagacacgaaagctggttcattctctatttcagacgccagctgcctgctacaggggaccagcgccaaaaactctgagttactttccccaggtgctaatcaggtgacaagcacagtggacagcctcgacagccatgacctggaaggggtacagattgacttcgatgccatcatagacgatggggaccactccagcctgatgtcgggggccctgagcccaagtatcattcagaacctttcccatagctcctcccgcctcaccacgcctcgggcgtccctcccattcccagcgctgtccatgagcaccaccaacatggctatcggggacatgagttctttgctgacctccctagcggaagaaagcaaattccttgcagttatgcaataggctttaggaaaaaaagactgcaaccaacggaaatcaataggagttgaagagattaaactgactttgttttggctgtttttttagttctgtatgtattttagcaatctcatctcacctaactgagatgtgtttcaattatattccttttatggaaaaggactctgaaaaaccctaaagtattctagggagaaactgtcttccatttcagttttgaatcagtattgttacactcaaaccaccctctttttaaaaaaaaaaaaaaaaactgtaagccccgccccctttttagtaaaccgatgtaaatttgtgatgtgcatattcttctttcttttagaagagcagtcaaattaaaggatttgacatgttttgctgttgctcaaaggaaataggagttggtgtgcttgtgaccaaggggttacacttccagcttttaaaattctcctttacatgtgctcagtgttttgttttgtgttttggtttctgttttttattttaattcccacattgggcacaagaatcagaatatggatagctagtttaagaaacttttgtgggtgcactgtagcatagatgacagaatattgatgttccccccatctccaattcagttcagggcattccacagttaaacagaaatgggaacgtggggctcttataaatgaaatgggcgctcacagttttggttttcagctcttcatgtctgtaagtgtgctttgggggaggctatgtctgtatggtcgattctcagttatcacatttgcctctcctcccactaccttcatgaacattcagtgctgtttcgcactgcagttagagagaagggacggacagttggtgacactcagccacattgctacttttatctgttctggtaagaagttagatagatggtagattgaagcaattgggtagaattagttgggggaatatttatgagttgctgtgtttgttgattagttccatctctttcccattttaactgagaattgattatatatagctctaagtatataggtatttaaacaaccccacaagcggctgtatcagtaacatttattaattccactatagtgagggaggatttccattctaaataccttattttgagggatttataaaacttagttgtaaaagagaaagcccacatagtgggaataaattgcttcagccatttttagtatttgagagcactagggaagatgtttagtagctgtgtggatgccttttttcacaccctgtctattgaatgctgcatccattcacgaagttaaatgttacatgcagttagtccttaatgtggactggatctgtacttttgttttggattaaaacatttaaagatttttgaagtgcagctactccccacgtgcatttgatacacataaaagtcatactgtgtgtgcacaaagagtacatggattttccagcatattgctttaaaaaattatataaactgttaaaatattaacacctcaggctacctgctgtattctgtcccattgacccctggaattggatttactgcaagtgattgataattcaattatgtggcttttcccctttaatcttgccatttaaattacagtagaaagacaaaatcaagtaaaataaagtgttagataatagaaagagtgttaagaccagcccacttttctcatgtttatgttctttcatttggaccaagaatctccgcatggaggttgatttgccactggggactttggctaagactattaggtttgctttcaactagatgttcctgagacaagcagagggacactgcaattccccttccatgcctgctgttctcccccatgtaagtcttctttgaaattaacggatgtgtctcctttggaacagccccataacaaaagagaactactgatctgagcataggaaagtagaggctctaccacttttcagttgaaaaagcaagactttctctgtgtttctgaaacaaggcataatgttgtcacagaatcagagatccagtctcacttttccacaaatctccaaatctccagtcttatcttgtgtgctctaatggtttggttcaatccctttccaactcttgttttcaaagcatggggcctgagtgttctccactcctcctaagaaaggagcttgggtggaagggaccatgctgacctcctccatcagagggctcttccagtagtattctcggatgcaacctccatttctcagttaccattatttcctgtatcagctttgtccttcctggagggatgcacagtgatccggcccaccactgttgttgtcttgtgcttctgctctttcctatggtttcaggttattttctgggtttcccctattcttcttttatttctttttttttttatatttgctttcctttctactgcttttagatttgcaggagatgcaagtttcagctcaatgtttggcttctctcaatatggaaatttcagaaggacagaggagaggagggaggaagaagaaagtatactcctccagaatttcagtgatctgttgtggcagtccagtggaaggaaggtcttttgaggtcacttagaagcatctttttgggacatccttttgggatctctgtaggctaggcatctcatatcttgagactcacccccagcctccaagcctctctccatttctctaacctatgcattttagagcgagaggaccgcctcactagtgtcaccatcctgccttttctaaaacatgcaggctcacacattctactcctgcttaatgtctgtgttaaacgttttctaaccatttttgttttatttttctgaaaaagttaacccctcccaactcctcacacattggctcttcctcttgagccacaaagttttgattcttgcgatgtatgtgccttattttatgttaatcttgtcaatgagagggaccagttggtgttgcccaatcagcactccaaggctgtgtgtgcaccagccagagagcgcacggtggtagcagagtcgaggctgtcttgtatcctggtttcatgtgttgttttgaactgataggaggatgttctcttctgacaagttacccttgtgtatcctgcagacatgtaaaataaaatacaagttcatttttttcaccttttttagatttttttaaaaaataaaatgtgtaatcctttttttaaaagaaacacatgtaaatacatttaagtattgtaggcatagcgttcagatgtgactggcccaggcgttcctcggacaagcctgcattccccgtgatcacgcccacctcaagcccaggggctgcagcccagccacagatgaactctacctttgctttcagaaccacttagtccttttgtaacaaagaaaaaaaaatgtttcttacaatgtcaataaaaaattctttgtatggaaatttttattgggttgtttattaaatgcatagttgaatggaaagattgctttctttgaaaacatccagagcctgtagctggatccagacccctcacgtagaagatgaatggacttttgctgtgagatccagattccttagccctaaactggagaataagatgcaaatacatacatgctcatggtgttttgaggatgtgtacccggggggcacaccagttgcaacaattattgtgtttctttatattattgctttctaaattcagtgaggaaggatggtgatggggtttaacgtctaacaacttaatttgtccctcttttgtatgttatcctctcatttcagagatgccctaccacatgtcaacagaaaatctgacacgatagaagcctactttatgtggcttttagtaactgacctcagccagaataaattgtctcccatgtttttcttgtgtcagtgtgcaatattattctccagattaccgtaagccactccaaaagccttcccttcctctttctaagtagtagtacatgtcttttgagccatcagctgaggataattgtttctgggaagggcaggagtcctggctgtgggtatctcaaggctacaaggatggacacatgcatgtatacacacacaggtacaacagcatgtgttccccaggccttatatcctgtggggggtgtatgttccctgtcctccagcagggtttctttggccatagggatgcttcatgctttcctgattctcggggagaatttccccccatccaatccaagatgctttgcttttgtaactagatcccttatataaggtatccaaatgaatccagaaaaaaataaggaaaatatgaatttatgccctgcctcaggtataaactgtcagctcacaaagagacatgccatgtaccaaatcaaaataaaagaaatgagagaaatgaggctaagagaaaggaaacttagggaagggacacccccaggaacgaggtgggtgatgtgcactccttcaatccacatgagctgggggtggatggggctcacagctttgtttgtaaaaatgcctcttgcacagtaaatacaaaggaagcagagtttgaggtaaaaaggtggagctacaatctgttatttcataaagatttcctttaagtaattttgggaatgtaaagacattatatcttacccaaacaagaatataatagaatgctaaaatgagaagcaaaaatttacctactgccaaaatgtcttatttgtcctttttttttccccctcccaggttttctacttattttcttggcagtcttcccttttggtttgactttagagtacatttactattccaaacataatctgaacacgtctttcctttcatattagcctttactttctaaaatttcattttactaacatagaccttgttcatgccttttctacctagttattcaagctcttgacaattttcaaaacagtaatagagtctaaattgtttttaggcttttttttctttgcatacattttgtggccagcactcacccagcagagccatggaaattccattctacaacttttctcacccgtccccaaatctcaaatgtcacacactgcttccacctttcctcagcacccagtggtaggttatcatgacccctgccttcagagaccttgcactgtctgggacatagggcagtgatgacatgttccattaattcaaccttgctgcctgagtatctaatattccattcatattctcttatagggactggagatgaggagatgaataaaacacagttcatatccatgagctcccagcccagtgggagaggcagacagggaaacaggatgcaatggcaactcataatggaagatgttcaaggggaagttcagcttggggcactgtccatctgaagtgcctatcgtggggcttcttagacattctactactggcatttggggctggataattctttgttgtagggcactgtcttaagtactatagaatgtttagtggtgtccctggccggtacccactagataccagtagcattcccccacgtggtgacagctaaaaacatctgcagacaacacggggcagtggggagacatcgctgcagactgagaacccctggtttatggaatgaaaatacaagtagagatattctgcaggcaggggcccagagagagatcccagtacacgcccagactcagcagcctttagtctgcaggtgacaggtgaagaaagggtaagagtgtcattgccaggcacaggggtagcaggagtagaggactgaggaagaaatcttgaggatcactggccccagggaccaagagacaagaaggcctgcataagaaagggaggaggggaggggaggggaagggaagggagggtgggagaggcagcagagagggtgtgctctagaaacacggaggccgattctagaaggctaatactatcaaaaacaacatccagatcaagtaaaacatggacaggaaaagacaggttttaagagttaggagaccctggatgaccgcagggaagtatttttcagtggcgtggttgggaagagaaactagaacacaacagatgagaattaagtggcacatgagaaaaggggaatgcagtggcctcttttaagccacatactgcatttcaccccctctgagacgccttccacagtaagacacatggtactccatgttcccactaagaaagaacacgcactgtccattaaactatgacatggtgcttttcatcctctaacaggcaagctccaattttagtagttaccaaattggaaaaaaaaaatgcataccttggagagtatgaaagacattatttcccaaggaaaggaaagagatagtggatcaagaaggggtggagagtaggaaaggttgaacttttcttgtaactgttcctctttcttcctctctctctcctcctccatgcaagaggcttggctgtgctacttggccaataggaaagaggcagcagcatggacaaggtagatgttctagtgaacagagccggcatggcaactcccttgacccatgagatagatacctgtcctgagtgatgaggcaaagggtaaggaccaggggaagctccgattgatgtgctggaatggccataggtcaagcaacccagagaatgcaaaggtgacttagacctgtgaagacaagaccatctggcaatgtgtcaggaaggccgctgagcctgacctgggcctctgaactgaatggggagtgaagaagcggttggaaggtagagcaggaagcatgaagtaccccgtgaatcagcccgaggatcatgcttcactgcccactgctgagttcctccaggacctgggttgaatagactgggggcaagcctcaggggtggtggggggagattattttgatcttttcaggaaaaataattctgtaaaacaccctttggcaatgacaggagtggcatgcaaggagggtgctggagaaggactggaggtggttggggtgccctcggactctcatggggcccacagctgccctgctgctgggttcctcaagcggccagacccccctcccattctgcaagttcctcctccctccctgcaggaagaaagcaggagagtgggcaagggaggggctgcagaggtcaggaatgatgcactcttccctcagcttcctcccagcccccaggaggccggttccagcctgacccctgcaaaggaagaccgtgaccacagaggtgggatgctggggagaactggggccaagaagcaggacttgccatcaccagctcttcaccaagtaaggagggaactgtatgtggaattccccgtgagcagggcatggacctagtttttttcctttcactctacaggaatattgtaatgaagtaccaggttaatttcctcacaggtacctcgacttcccaccctgccgcggctctgtggggctcagctcacacttccctcttgctcctggtttcccttctcctacttgagacttcccagcctgtggctgagaagtggcctggcaagtctgctaacccgactagaaggagcactgcagtgccgaagagctggccagcctcaccctggggccctccgtttggaaccgaggcttgctgttaacttcaggaagcatttagcatgcctggataggagaatgtgcatggatggattggctttgctctcttcctgcgccgcttcggcctttgtcctcctaccccatctaaagaaagaccctctagtcactccaattggaagaagctaaaacctgatcacatccctacctttgaaaaagatccagttttagaatgcatgcttctacgccagcggtagaagggacatctcagcagttacctcccttctgtatgcctgttcctgaactattgaaataaaaactccaaatacgcatttggtcatacgtgggacatggtgcaaccgtcctggggctctgctcatgccctgactgatggctggagagcatatgcaaggtttaccttatctgaggtcatcatggagcagatacaggaagaggactaagcactcttctcctactttgcttccctacacgcaaaaacctctgctcctggaagggtccctaagaaaagatggggaaagaaaaagcgctcgccccctccctgtgaacagcccaacccactttgaatcctgcagtgcctccagatgagtgttcttcccctgcagctggaaagcctcctgtgctcagaaattccagggtcccgacatgatccatgctcagaagttgggctgcagctcctcggagctggcaggcacaagcctccagcccttcagggcttgcaagagccaaacgcgctgcggaggtgtgattcactgagttcccagaggaaagggaggcagccagctggcaggggattactgaacagccaggccaaggcattccgttgctgtttggagacaagcagccagctacctcccttctcttcctcccccgctgaggcgcagagctggagacaggccagggccctgggggaagaagaaaaggaactgagctgcctcacttactaccaagataagaaggctgtggctgctatccccagtgagccaagacaagaaatgcttacattttcatttgaagatgattctgacgcccccaaatatttatccaaaatatacctagatgcattgcccagagagaattttttattaagcggcaaactgggtaggcaagaaaaattgtattggctgaagaacaaacaaaaaagcccagtgtgtatgtcatagctcaaggattggctatattctcctaaataagagacttctttctctcatgccttggatatctcaggctctctggggtgactgtaagttacagatttattgctcagccattcttagccctgatgctcttcagaaactcactgctttatgaacccaggtccccgagacaccttccatttgatccacatctgtccaaagatgaagtcatgaaatatgataagtatttcttctgaagttcatgcaaagaacaaaaaccaaagatacaatccaagctccttcccctttgagcttagataaatgtgtcttttgaattgagataatagcccagaccctttctcacccacctctgcctcatctacaggacagtaacaacactctctcagagccttcaaggcaaaggggagaagaacattctgctgacctgcaagaccgaaggtcaaggaacagactttccttggattcccttgacccagagtttcttcactagctctgcagttttagacaaggtaatatgatttcccactgttccagctgaacacccggcagcttccaacagggtgatgattccaacttttttgaaatgcattctgaggctatcctaaatcaagtagatttaacactgagccaaaaggaaggctttggaaaacaagttgattttaatccagccttaccagccctgtgtactagaattttagcttcattcagtcacagggtttccactcctgagaaggagtacaaaaagggtaaagaaaaggtggtgctctgacaccaacccaactggctggattcaattctgcaattcagttctggcatcaactatgtggaggctggtgtcagcgtagaccccatgaattaagagctcagtcctccacaagacagtcccgacttcagatgccagccagaagttgagggggttcccagggccgttcatacttctgaccaactggctacaaattcagaggtttccctaaccccctcaggttgataattctttggaaccattcacagaattcagaaaagcaccacccttgttattaaacttttattataaagactacaactcagggacagccaaatggggagatgcatagggtgaggtctgggagggccttgaacccagagcttccgtgccctctccttatggagccagggtctttctccctgtgggcagatcaatatcttcatcaaccaggacactccactgactctcggggtccagaggttttactggggctgaattatgttggcataattaattaaatcattggccacacgattaaattccatctccagcccccttcccctctccaggagtcaggcttggcccactgtcccagcccttcaatcgtatggttggtctttcttgtgaccaaccccatcttgaagccatctagaagccaccatgagttacctcattagaaaaaactcaggtgcgatccaagggtctcataataacaaagacactcctatcactggagaaattccaagggttttagcatctccctaccaggaaccagggaaaaaggcctcagtcaaatttcttcttatacaacagtggcatctccttggaaataaaccagtctaggactaagaaagaaaaagagatgagagtaagacatgcctagagctgtggagtcccaggttactggagaagagctgacctgggctgacatttggacagagccccagcactttctccaataactagatgttcaatgtattcattccttgtagcttcaaagttctcatctggaaaagaggacttgagattgtcgatataaaatgccgagcatattcagcacccagtaagtgttcagtgaaagtttgtgttgttgttcgttcttttccctcaccctgacagggactgcacaggactgaattgcaggaaagaaggcccacaatatgcaggaagagggacagctcctgggagccagaagccctcgcaaaggggtgcattgaggcctatactctccagcccatccacctgctgttagttctgaaaccaaaggcagacagatttgtgcactgtgtgttaggatgtgagaacagaacactatgaacgtatcttcattcatccaaccttgtagcaatcaaaagtccaaagaagcaagcactggacatggtattttactccaatgtccaatgtataatcggctcctgacaggaattctagaatttatatttaataccaaattaacaaaaaaggacaaccatttttaaaagatattttgttatcatacctatatgtgatataaaaattaaaaaataggccaggtgcggtggctcaagcctgtaattcctgaactttgggaggctgaggtgggcagatcatgaggtcaggagttcaagaccagcctggccagcatagtgaaaccccatctctactaaaaaaatacaaaaattagctgggcgtggtggccggcacctgtagtcccagctacttgggaggctgaggcagaaaaatctcttgaacccgggagtcagaggttgcggcaagccgagattgcgccaatgcactccagactgggtgacacagcgagactctgtctcaaaaaaaaattaaaaaaaaaaaaagaataaaagccaactgtcatttgcccattcaaaaataccattttgtgatctagttctaagtctgtttttttatatatatctatgtgtgtatatagctataatacaaattgagcacctcaatttgaaaatcccaaatttgaaatgctccaaaatctgaaactttttgactgccaacctgacaccagaagtggaaaattctatacctgacctcatgtgatgggcacacaaaactattaaaaatatcttataaaattaccttcaaactatatgtataaggtatatatgaaacataaatgaattttgtctttagacttgagtcccattcccaagatgtctcagtatggatatgcaaatatttcaaaatccagaaaaatctgaaatttgaaacacttctggtcccaaatattttggataaggaatacttgccctggatatgcgtgtgtgtgtgtgtgtgtgtgtgtgtgtgtgtgtctacactcaacaaatatatttgcacaatccagacccactctgaaacctcaccagactgtaagattcacacctcttttcactgcagtaagacttgaggtcaaaggcaatccatatttcaccacatagaaccctgtagcaaatttgtcttcaattattttattggcatggttttgaaaatgggtaatcatttattttttttaattaaaaaagaaacttttttaggatagggtcttgctatgttgcccaggctagtctccaactcctggcctctagtgaccctcccaccttagcctcctgagttgccaggattacccgcacttgccaccgtgcacagcctcaggggtgatatttctgaacaattattttatcacaaaatttattgtttagatgcttcaagtattttgaatttaagataaattatcttccacagcattcaagaatgtgacccagtgataagtctggtgaggagaaacatatagttctgtgcaaagacagacactcaatattttgctatgtttactatgtttgctatgtttgctatgtctttttttaacgcatttttttttcagaaaaatgcctattcatttacttattatagaatgaatacgccaggcatggtagctcacgcctgtaatcccagcactttgggaggccgagatggga

SEQ ID NO: 1078 - DNA, 5196 bp, Homo sapiens
cggccgcgcggagcggggagccgccagcctgcgccccgtccgcgggtctatgggaagttcggggacttgacagccgctgccgccgcaggtacggcatttttggtcgaagagagctgaagtaatgagaagacatcatggaggcccagtcccacagctccacgaccactgaaaagaaaaaagttgagaattccatagtgaagtgctccactcgaacagatgtgagcgagaaagccgttgcctccagcaccacttctaatgaggatgaaagtcctggacagacttatcacagagagagaagaaacgcaatcactatgcagccacagaatgtccaggggctcagcaaagtcagtgaggaaccttcaacatcgagtgacgagagggcctcattgatcaagaaagagatccatgggtccctgccacacgtggcggagccctctgtgccgtaccgcgggacggtgtttgccatggaccccaggaatggttacatggagccccactaccaccctcctcatcttttccctgccttccatcctcctgtaccaattgatgccagacatcatgagggccgttaccattacgatccatctccgattcctccattgcatatgacttccgccttatctagtagccctacgtatccggacctgcccttcattaggatctccccacaccggaaccccgctgctgcttccgagtctcccttcagccctccacatccctacattaatccctacatggactatatccgctccttgcacagcagcccatcgctctccatgatctcagcaacccgtgggctgagccctacagatgcgccccatgcaggagtcagcccagcagaatactatcatcagatggccctgctaactggccagcgcagcccctatgcagacattattccctcagctgccaccgccggcacgggggccatccacatggaatatcttcatgctatggatagcaccagattctccagccccaggctgtcagccaggccgagccgaaaacgtacactgtccatatcaccactctccgatcatagctttgaccttcagaccatgataaggacgtctcccaactccttggtcacgattctcaataattcccgtagcagctcttcagcaagtggctcctatggtcacttatctgcaagtgcaatcagccctgccttgagcttcacctactcttccgcgcccgtctctctccacatgcatcagcagatcctaagccgacaacagagcttaggttcagcctttggacacagccctccactcatccaccctgccccaacttttccaacacagaggcctattccagggatccctacggttctgaaccccgtccaggtcagctccggcccttctgagtcctcacagaacaagcccacgagtgagtctgcagtgagcagcactggtgacccgatgcacaacaagaggtccaagatcaaacccgatgaagacctccccagcccaggggctcgggggcagcaggaacagcccgaaggaacaacccttgtcaaggaggaaggggacaaagatgaaagcaaacaggagcctgaagtcatctatgagacaaactgccactgggaaggctgcgcgagggagttcgacacccaagagcagcttgtgcaccatataaataacgaccatattcatggagagaagaaggagttcgtgtgcaggtggctggactgctcaagagagcagaaacccttcaaagcccagtatatgttggtagtgcatatgagaagacacacgggcgagaagcctcacaaatgcacttttgaaggttgcacaaaggcctactcgagactagaaaacttgaaaacacacttgagatctcacactggagagaaaccatacgtctgtgagcacgaaggttgcaacaaggctttctcaaatgcctctgatcgcgccaaacaccaaaacagaacgcattccaatgagaaaccatatgtgtgcaaaatcccaggctgcactaagcgttacacagacccaagctccctccggaaacatgtgaagacagtgcatggcccagaggctcatgtcaccaagaagcagcgaggggacatccatcctcggccgccacccccgagagattccggcagccattcacagtccaggtcgcctggccgaccgactcagggagcccttggtgagcagcaggacctcagcaacactacctcaaagcgggaagaatgcctccaggtgaaaaccgtcaaggcagagaagccaatgacatctcagccaagccctggtggtcagtcttcatgcagcagccaacagtcccccatcagcaactattccaacagtgggctcgagcttcctctgaccgatggaggtagtataggagacctcagtgccatcgatgaaaccccaatcatggactcaaccatttccactgcaaccacagcccttgctttgcaagccaggagaaacccggcagggaccaaatggatggagcacgtaaaactagaaaggctaaaacaagtgaatggaatgtttccgcgactgaaccccattctaccccctaaagcccctgcggtctctcctctcataggaaatggcacacagtccaacaacacctgcagcttgggtgggcccatgacgcttctcccgggcagaagcgacctctctggggtggacgtcactatgctgaacatgctcaacagaagggacagcagcgccagcaccatcagctcggcctacctgagcagccgccgctcctcagggatctcgccctgcttctccagccgccgctccagcgaggcgtcacaggccgagggccggccgcagaacgtgagcgtggccgactcctacgaccccatctccaccgacgcctcgcgccgctccagcgaagccagccagagcgacggcctgcccagcctgctcagcctcacgcccgcccagcagtaccgcctcaaggccaagtacgcggctgccacaggagggccgccgccgacgcccctgcccaacatggagaggatgagcctgaagacgcgcctggcgctgctcggggatgccctcgagcctggcgtggccctgcctccagttcatgccccgaggaggtgcagcgacgggggagcccacggctacgggcggcgccacctgcagccgcacgatgcgccgggccacggcgtgaggagggccagcgacccggtgcggacaggctccgagggcctggccctgcctcgtgtgccgcgcttcagcagcctcagcagctgcaaccccccggcgatggccacgtccgcggagaagcgcagtctcgtgcttcagaattacacgcggcccgagggcggccagtcccgaaacttccactcgtccccctgtcctcccagcatcaccgagaacgtcaccctggagtccctgaccatggacgctgatgccaacctgaacgatgaggatttcctgccggacgacgtggtgcagtatttaaattcccagaaccaagcagggtacgagcagcacttccccagcgccctcccggacgacagcaaagtgccccacgggcccggtgactttgacgcgcccgggctgccagacagccacgctggccagcagttccatgccctcgagcagccctgccccgagggcagcaaaaccgacctgcccattcagtggaacgaagtcagctccggaagcgccgacctgtcctcctccaagctcaagtgtgggccgcggcccgctgtgccgcagactcgcgcctttgggttctgcaacggcatggtcgtccacccgcagaaccccttgaggagcgggcctgctgggggctatcagaccctcggggagaacagcaacccctacggtggcccagagcacttgatgctccacaacagccccggaagtggcaccagtggaaacgccttccatgaacagccctgtaaggccccgcagtatgggaactgtctcaacaggcagccagtggcccctggtgcactcgacggtgcctgtggtgccgggattcaagcctcaaagctgaagagcacccccatgcaagggagcgggggccagctgaatttcggcctgccggtagcgccaaatgagtcagctggcagcatggtgaatggcatgcagaaccaggacccagtgggacaggggtacctggctcaccagctcctcggcgacagcatgcagcacccgggggcaggccgccccggtcagcagatgcttgggcagattagtgctacctcacacatcaacatctaccaagggccagagagctgcctgccaggggctcacggcatgggcagccagccgtcaagcttggcagttgtcaggggctaccagccatgtgccagctttgggggcagcaggcgccaggctatgccgagggacagccttgctctgcagtcaggacagctcagtgacacaagtcagacctgcagggtgaatggtatcaagatggagatgaaagggcagccccatccgctgtgctctaatctgcagaattactctggtcagttctatgaccaaaccgtgggcttcagtcagcaagacacgaaagctggttcattctctatttcagacgccagctgcctgctacaggggaccagcgccaaaaactctgagttactttccccaggtgctaatcaggtgacaagcacagtggacagcctcgacagccatgacctggaaggggtacagattgacttcgatgccatcatagacgatggggaccactccagcctgatgtcgggggccctgagcccaagtatcattcagaacctttcccatagctcctcccgcctcaccacgcctcgggcgtccctcccattcccagcgctgtccatgagcaccaccaacatggctatcggggacatgagttctttgctgacctccctagcggaagaaagcaaattccttgcagttatgcaataggctttaggaaaaaaagactgcaaccaacggaaatcaataggagttgaagagattaaactgactttgttttggctgtttttttagttctgtatgtattttagcaatctcatctcacctaactgagatgtgtttcaattatattccttttatggaaaaggactctgaaaaaccctaaagtattctagggagaaactgtcttccatttcagttttgaatcagtattgttacactcaaaccaccctctttttaaaaaaaaaaaaaaaaactgtaagccccgccccctttttagtaaaccgatgtaaatttgtgatgtgcatat

SEQ ID NO: 1079 - protein, 1572 aa, Homo sapiens
MEAQSHSSTTTEKKKVENSIVKCSTRTDVSEKAVASSTTSNEDESPGQTYHRERRNAITMQPQNVQGLSKVSEEPSTSSDERASLIKKEIHGSLPHVAEPSVPYRGTVFAMDPRNGYMEPHYHPPHLFPAFHPPVPIDARHHEGRYHYDPSPIPPLHMTSALSSSPTYPDLPFIRISPHRNPAAASESPFSPPHPYINPYMDYIRSLHSSPSLSMISATRGLSPTDAPHAGVSPAEYYHQMALLTGQRSPYADIIPSAATAGTGAIHMEYLHAMDSTRFSSPRLSARPSRKRTLSISPLSDHSFDLQTMIRTSPNSLVTILNNSRSSSSASGSYGHLSASAISPALSFTYSSAPVSLHMHQQILSRQQSLGSAFGHSPPLIHPAPTFPTQRPIPGIPTVLNPVQVSSGPSESSQNKPTSESAVSSTGDPMHNKRSKIKPDEDLPSPGRQQEQPEGTTLVKEEGDKDESKQEPEVIYETNCHWEGCAREFDTQEQLVHHINNDHIHGEKKEFVCRWLDCSREQKPFKAQYMLVVHMRRHTGEKPHKCTFEGCTKAYSRLENLKTHLRSHTGEKPYVCEHEGCNKAFSNASDRAKHQNRTHSNEKPYVCKIPGCTKRYTDPSSLRKHVKTVHGPEAHVTKKQRGDIHPRPPPPRDSGSHSQSRSPGRPTQGALGEQQDLSNTTSKREECLQVKTVKAEKPMTSQPSPGGQSSCSSQQSPISNYSNSGLELPLTDGGSIGDLSAIDETPIMDSTISTATTALQARRNPAGTKWMEHVKLERLKQVNGMFPRLNPILPPKAPAVSPLIGNGTQSNNTCSLGGPMTLLPGRSDLSGVDVTMLNMLNRRDSSASTISSAYLSSRRSSGISPCFSSRRSSEASQAEGRPQNVSVADSYDPISTDASRRSSEASQSDGLPSLLSLTPAQQYRLKAKYAAATGGPPPTPLPNMERMSLKTRLALLGDALEPGVPPVHAPRRCSDGGAHGYGRRHLQPHDAPGHGVRRASDPVRTGSEGLALPRVPRFSSLSSCNPPAMATSAEKRSLVLQNYWEGGQSRNFHSSPCPPSITENVTLESLTMDADANLNDEDFLPDDVVQYLNSQNQAGYEQHFPSALPDDSKVPHGPGDFDAPGLPDSHAGQQFHALEQPCPEGSKTDLPIQWNEVSSGSADLSSSKLKCGPRPAVPQTRAFGFCNGMVVHPQNPLRSGPAGGYQTLGENSNPYGGPEHLMLHNSPGSGTSGNAFHEQPCKAPQYGNCLNRQPVAPGALDGACGAGIQASKLKSTPMQGSGGQLNFGLPVAPNESAGSMVNGMQNQDPVGQGYLAHQLLGDSMQHPGAGRPGQQMLGQISATSHINIYQGPESCLPGAHGMGSQPSSLAVVRGYQPCASFGGSRRQAMPRDSLALQSGQLSDTSQTCRVNGIKMEMKGQPHPLCSNLQNYSGQFYDQTVGFSQQDTKAGSFSISDASCLLQGTSAKNSELLSPGANQVTSTVDSLDSHDLEGVQIDFDAIIDDGDHSSLMSGALSPSIIQNLSHSSSRLTTPRASLPFPALSMSTTNMAIGDMSSLLTSLAEESKFLAVMQ

SEQ ID NO: 1080 - DNA, 5104 bp, Homo sapiens
ggcatttttggtcgaagagagctgaagtaatgagaagacatcatggaggcccagtcccacagctccacgaccactgaaaagaaaaaagttgagaattccatagtgaagtgctccactcgaacagatgtgagcgagaaagccgttgcctccagcaccacttctaatgaggatgaaagtcctggacagacttatcacagagagagaagaaacgcaatcactatgcagccacagaatgtccaggggctcagcaaagtcagtgaggaaccttcaacatcgagtgacgagagggcctcattgatcaagaaagagatccatgggtccctgccacacgtggcggagccctctgtgccgtaccgcgggacggtgtttgccatggaccccaggaatggttacatggagccccactaccaccctcctcatcttttccctgccttccatcctcctgtaccaattgatgccagacatcatgagggccgttaccattacgatccatctccgattcctccattgcatatgacttccgccttatctagtagccctacgtatccggacctgcccttcattaggatctccccacaccggaaccccgctgctgcttccgagtctcccttcagccctccacatccctacattaatccctacatggactatatccgctccttgcacagcagcccatcgctctccatgatctcagcaacccgtgggctgagccctacagatgcgccccatgcaggagtcagcccagcagaatactatcatcagatggccctgctaactggccagcgcagcccctatgcagacattattccctcagctgccaccgccggcacgggggccatccacatggaatatcttcatgctatggatagcaccagattctccagccccaggctgtcagccaggccgagccgaaaacgtacactgtccatatcaccactctccgatcatagctttgaccttcagaccatgataaggacgtctcccaactccttggtcacgattctcaataattcccgtagcagctcttcagcaagtggctcctatggtcacttatctgcaagtgcaatcagccctgccttgagcttcacctactcttccgcgcccgtctctctccacatgcatcagcagatcctaagccgacaacagagcttaggttcagcctttggacacagccctccactcatccaccctgccccaacttttccaacacagaggcctattccagggatccctacggttctgaaccccgtccaggtcagctccggcccttctgagtcctcacagaacaagcccacgagtgagtctgcagtgagcagcactggtgacccgatgcacaacaagaggtccaagatcaaacccgatgaagacctccccagcccaggggctcgggggcagcaggaacagcccgaaggaacaacccttgtcaaggaggaaggggacaaagatgaaagcaaacaggagcctgaagtcatctatgagacaaactgccactgggaaggctgcgcgagggagttcgacacccaagagcagcttgtgcaccatataaataacgaccatattcatggagagaagaaggagttcgtgtgcaggtggctggactgctcaagagagcagaaacccttcaaagcccagtatatgttggtagtgcatatgagaagacacacgggcgagaagcctcacaaatgcacttttgaaggttgcacaaaggcctactcgagactagaaaacttgaaaacacacttgagatctcacactggagagaaaccatacgtctgtgagcacgaaggttgcaacaaggctttctcaaatgcctctgatcgcgccaaacaccaaaacagaacgcattccaatgagaaaccatatgtgtgcaaaatcccaggctgcactaagcgttacacagacccaagctccctccggaaacatgtgaagacagtgcatggcccagaggctcatgtcaccaagaagcagcgaggggacatccatcctcggccgccacccccgagagattccggcagccattcacagtccaggtcgcctggccgaccgactcagggagcccttggtgagcagcaggacctcagcaacactacctcaaagcgggaagaatgcctccaggtgaaaaccgtcaaggcagagaagccaatgacatctcagccaagccctggtggtcagtcttcatgcagcagccaacagtcccccatcagcaactattccaacagtgggctcgagcttcctctgaccgatggaggtagtataggagacctcagtgccatcgatgaaaccccaatcatggactcaaccatttccactgcaaccacagcccttgctttgcaagccaggagaaacccggcagggaccaaatggatggagcacgtaaaactagaaaggctaaaacaagtgaatggaatgtttccgcgactgaaccccattctaccccctaaagcccctgcggtctctcctctcataggaaatggcacacagtccaacaacacctgcagcttgggtgggcccatgacgcttctcccgggcagaagcgacctctctggggtggacgtcactatgctgaacatgctcaacagaagggacagcagcgccagcaccatcagctcggcctacctgagcagccgccgctcctcagggatctcgccctgcttctccagccgccgctccagcgaggcgtcacaggccgagggccggccgcagaacgtgagcgtggccgactcctacgaccccatctccaccgacgcctcgcgccgctccagcgaagccagccagagcgacggcctgcccagcctgctcagcctcacgcccgcccagcagtaccgcctcaaggccaagtacgcggctgccacaggagggccgccgccgacgcccctgcccaacatggagaggatgagcctgaagacgcgcctggcgctgctcggggatgccctcgagcctggcgtggccctgcctccagttcatgccccgaggaggtgcagcgacgggggagcccacggctacgggcggcgccacctgcagccgcacgatgcgccgggccacggcgtgaggagggccagcgacccggtgcggacaggctccgagggcctggccctgcctcgtgtgccgcgcttcagcagcctcagcagctgcaaccccccggcgatggccacgtccgcggagaagcgcagtctcgtgcttcagaattacacgcggcccgagggcggccagtcccgaaacttccactcgtccccctgtcctcccagcatcaccgagaacgtcaccctggagtccctgaccatggacgctgatgccaacctgaacgatgaggatttcctgccggacgacgtggtgcagtatttaaattcccagaaccaagcagggtacgagcagcacttccccagcgccctcccggacgacagcaaagtgccccacgggcccggtgactttgacgcgcccgggctgccagacagccacgctggccagcagttccatgccctcgagcagccctgccccgagggcagcaaaaccgacctgcccattcagtggaacgaagtcagctccggaagcgccgacctgtcctcctccaagctcaagtgtgggccgcggcccgctgtgccgcagactcgcgcctttgggttctgcaacggcatggtcgtccacccgcagaaccccttgaggagcgggcctgctgggggctatcagaccctcggggagaacagcaacccctacggtggcccagagcacttgatgctccacaacagccccggaagtggcaccagtggaaacgccttccatgaacagccctgtaaggccccgcagtatgggaactgtctcaacaggcagccagtggcccctggtgcactcgacggtgcctgtggtgccgggattcaagcctcaaagctgaagagcacccccatgcaagggagcgggggccagctgaatttcggcctgccggtagcgccaaatgagtcagctggcagcatggtgaatggcatgcagaaccaggacccagtgggacaggggtacctggctcaccagctcctcggcgacagcatgcagcacccgggggcaggccgccccggtcagcagatgcttgggcagattagtgctacctcacacatcaacatctaccaagggccagagagctgcctgccaggggctcacggcatgggcagccagccgtcaagcttggcagttgtcaggggctaccagccatgtgccagctttgggggcagcaggcgccaggctatgccgagggacagccttgctctgcagtcaggacagctcagtgacacaagtcagacctgcagggtgaatggtatcaagatggagatgaaagggcagccccatccgctgtgctctaatctgcagaattactctggtcagttctatgaccaaaccgtgggcttcagtcagcaagacacgaaagctggttcattctctatttcagacgccagctgcctgctacaggggaccagcgccaaaaactctgagttactttccccaggtgctaatcaggtgacaagcacagtggacagcctcgacagccatgacctggaaggggtacagattgacttcgatgccatcatagacgatggggaccactccagcctgatgtcgggggccctgagcccaagtatcattcagaacctttcccatagctcctcccgcctcaccacgcctcgggcgtccctcccattcccagcgctgtccatgagcaccaccaacatggctatcggggacatgagttctttgctgacctccctagcggaagaaagcaaattccttgcagttatgcaataggctttaggaaaaaaagactgcaaccaacggaaatcaataggagttgaagagattaaactgactttgttttggctgtttttttagttctgtatgtattttagcaatctcatctcacctaactgagatgtgtttcaattatattccttttatggaaaaggactctgaaaaaccctaaagtattctagggagaaactgtcttccatttcagttttgaatcagtattgttacactcaaaccaccctctttttaaaaaaaaaaaaaaaaactgtaagccccgccccctttttagtaaaccgatgtaaatttgtgatgtgcatat

SEQ ID NO: 1081 - protein, 1572 aa, Homo sapiens; identical to SEQ ID NO: 1079

SEQ ID NO: 1082 - DNA, 6015 bp, Homo sapiens
cggccgcgcggagcggggagccgccagcctgcgccccgtccgcgggtctatgggaagttcggggacttgacagccgctgccgccgcaggtacggcatttttggtcgaagagagctgaagtaatgagaagacatcatggaggcccagtcccacagctccacgaccactgaaaagaaaaaagttgagaattccatagtgaagtgctccactcgaacagatgtgagcgagaaagccgttgcctccagcaccacttctaatgaggatgaaagtcctggacagacttatcacagagagagaagaaacgcaatcactatgcagccacagaatgtccaggggctcagcaaagtcagtgaggaaccttcaacatcgagtgacgagagggcctcattgatcaagaaagagatccatgggtccctgccacacgtggcggagccctctgtgccgtaccgcgggacggtgtttgccatggaccccaggaatggttacatggagccccactaccaccctcctcatcttttccctgccttccatcctcctgtaccaattgatgccagacatcatgagggccgttaccattacgatccatctccgattcctccattgcatatgacttccgccttatctagtagccctacgtatccggacctgcccttcattaggatctccccacaccggaaccccgctgctgcttccgagtctcccttcagccctccacatccctacattaatccctacatggactatatccgctccttgcacagcagcccatcgctctccatgatctcagcaacccgtgggctgagccctacagatgcgccccatgcaggagtcagcccagcagaatactatcatcagatggccctgctaactggccagcgcagcccctatgcagacattattccctcagctgccaccgccggcacgggggccatccacatggaatatcttcatgctatggatagcaccagattctccagccccaggctgtcagccaggccgagccgaaaacgtacactgtccatatcaccactctccgatcatagctttgaccttcagaccatgataaggacgtctcccaactccttggtcacgattctcaataattcccgtagcagctcttcagcaagtggctcctatggtcacttatctgcaagtgcaatcagccctgccttgagcttcacctactcttccgcgcccgtctctctccacatgcatcagcagatcctaagccgacaacagagcttaggttcagcctttggacacagccctccactcatccaccctgccccaacttttccaacacagaggcctattccagggatccctacggttctgaaccccgtccaggtcagctccggcccttctgagtcctcacagaacaagcccacgagtgagtctgcagtgagcagcactggtgacccgatgcacaacaagaggtccaagatcaaacccgatgaagacctccccagcccaggggctcgggggcagcaggaacagcccgaaggaacaacccttgtcaaggaggaaggggacaaagatgaaagcaaacaggagcctgaagtcatctatgagacaaactgccactgggaaggctgcgcgagggagttcgacacccaagagcagcttgtgcaccatataaataacgaccatattcatggagagaagaaggagttcgtgtgcaggtggctggactgctcaagagagcagaaacccttcaaagcccagtatatgttggtagtgcatatgagaagacacacgggcgagaagcctcacaaatgcacttttgaaggttgcacaaaggcctactcgagactagaaaacttgaaaacacacttgagatctcacactggagagaaaccatacgtctgtgagcacgaaggttgcaacaaggctttctcaaatgcctctgatcgcgccaaacaccaaaacagaacgcattccaatgagaaaccatatgtgtgcaaaatcccaggctgcactaagcgttacacagacccaagctccctccggaaacatgtgaagacagtgcatggcccagaggctcatgtcaccaagaagcagcgaggggacatccatcctcggccgccacccccgagagattccggcagccattcacagtccaggtcgcctggccgaccgactcagggagcccttggtgagcagcaggacctcagcaacactacctcaaagcgggaagaatgcctccaggtgaaaaccgtcaaggcagagaagccaatgacatctcagccaagccctggtggtcagtcttcatgcagcagccaacagtcccccatcagcaactattccaacagtgggctcgagcttcctctgaccgatggaggtagtataggagacctcagtgccatcgatgaaaccccaatcatggactcaaccatttccactgcaaccacagcccttgctttgcaagccaggagaaacccggcagggaccaaatggatggagcacgtaaaactagaaaggctaaaacaagtgaatggaatgtttccgcgactgaaccccattctaccccctaaagcccctgcggtctctcctctcataggaaatggcacacagtccaacaacacctgcagcttgggtgggcccatgacgcttctcccgggcagaagcgacctctctggggtggacgtcactatgctgaacatgctcaacagaagggacagcagcgccagcaccatcagctcggcctacctgagcagccgccgctcctcagggatctcgccctgcttctccagccgccgctccagcgaggcgtcacaggccgagggccggccgcagaacgtgagcgtggccgactcctacgaccccatctccaccgacgcctcgcgccgctccagcgaagccagccagagcgacggcctgcccagcctgctcagcctcacgcccgcccagcagtaccgcctcaaggccaagtacgcggctgccacaggagggccgccgccgacgcccctgcccaacatggagaggatgagcctgaagacgcgcctggcgctgctcggggatgccctcgagcctggcgtggccctgcctccagttcatgccccgaggaggtgcagcgacgggggagcccacggctacgggcggcgccacctgcagccgcacgatgcgccgggccacggcgtgaggagggccagcgacccggtgcggacaggctccgagggcctggccctgcctcgtgtgccgcgcttcagcagcctcagcagctgcaaccccccggcgatggccacgtccgcggagaagcgcagtctcgtgcttcagaattacacgcggcccgagggcggccagtcccgaaacttccactcgtccccctgtcctcccagcatcaccgagaacgtcaccctggagtccctgaccatggacgctgatgccaacctgaacgatgaggatttcctgccggacgacgtggtgcagtatttaaattcccagaaccaagcagggtacgagcagcacttccccagcgccctcccggacgacagcaaagtgccccacgggcccggtgactttgacgcgcccgggctgccagacagccacgctggccagcagttccatgccctcgagcagccctgccccgagggcagcaaaaccgacctgcccattcagtggaacgaagtcagctccggaagcgccgacctgtcctcctccaagctcaagtgtgggccgcggcccgctgtgccgcagactcgcgcctttgggttctgcaacggcatggtcgtccacccgcagaaccccttgaggagcgggcctgctgggggctatcagaccctcggggagaacagcaacccctacggtggcccagagcacttgatgctccacaacagccccggaagtggcaccagtggaaacgccttccatgaacagccctgtaaggccccgcagtatgggaactgtctcaacaggcagccagtggcccctggtgcactcgacggtgcctgtggtgccgggattcaagcctcaaagctgaagagcacccccatgcaagggagcgggggccagctgaatttcggcctgccggtagcgccaaatgagtcagctggcagcatggtgaatggcatgcagaaccaggacccagtgggacaggggtacctggctcaccagctcctcggcgacagcatgcagcacccgggggcaggccgccccggtcagcagatgcttgggcagattagtgctacctcacacatcaacatctaccaagggccagagagctgcctgccaggggctcacggcatgggcagccagccgtcaagcttggcagttgtcaggggctaccagccatgtgccagctttgggggcagcaggcgccaggctatgccgagggacagccttgctctgcagtcaggacagctcagtgacacaagtcagacctgcagggtgaatggtatcaagatggagatgaaagggcagccccatccgctgtgctctaatctgcagaattactctggtcagttctatgaccaaaccgtgggcttcagtcagcaagacacgaaagctggttcattctctatttcagacgccagctgcctgctacaggggaccagcgccaaaaactctgagttactttccccaggtgctaatcaggtgacaagcacagtggacagcctcgacagccatgacctggaaggggtacagattgacttcgatgccatcatagacgatggggaccactccagcctgatgtcgggggccctgagcccaagtatcattcagaacctttcccatagctcctcccgcctcaccacgcctcgggcgtccctcccattcccagcgctgtccatgagcaccaccaacatggctatcggggacatgagttctttgctgacctccctagcggaagaaagcaaattccttgcagttatgcaataggctttaggaaaaaaagactgcaaccaacggaaatcaataggagttgaagagattaaactgactttgttttggctgtttttttagttctgtatgtattttagcaatctcatctcacctaactgagatgtgtttcaattatattccttttatggaaaaggactctgaaaaaccctaaagtattctagggagaaactgtcttccatttcagttttgaatcagtattgttacactcaaaccaccctctttttaaaaaaaaaaaaaaaaacttgttaaaatattaacacctcaggctacctgctgtattctgtcccattgacccctggaattggatttactgcaagtgattgataattcaattatgtggcttttcccctttaatcttgccatttaaattacagtagaaagacaaaatcaagtaaaataaagtgttagataatagaaagagtgttaagaccagcccacttttctcatgtttatgttctttcatttggaccaagaatctccgcatggaggttgatttgccactggggactttggctaagactattaggtttgctttcaactagatgttcctgagacaagcagagggacactgcaattccccttccatgcctgctgttctcccccatgtaagtcttctttgaaattaacggatgtgtctcctttggaacagccccataacaaaagagaactactgatctgagcataggaaagtagaggctctaccacttttcagttgaaaaagcaagactttctctgtgtttctgaaacaaggcataatgttgtcacagaatcagagatccagtctcacttttccacaaatctccaaatctccagtcttatcttgtgtgctctaatggtttggttcaatccctttccaactcttgttttcaaagcatggggcctgagtgttctccactcctcctaagaaaggagcttgggtggaagggaccatgctgacctcctccatcagagggctcttccagtagtattctcggatgcaacctccatttctcagttaccattatttcctgtatcagctttgtccttcctggagggatgcacagtgatccggcccaccactgttgttgtcttgtgcttctgctctttcctatggtttcaggttattttctgggtt

SEQ ID NO: 1083 - protein, 1572 aa, Homo sapiens; identical to SEQ ID NO: 1079

SEQ ID NO: 1084 - DNA, 146693 bp, Mus musculus
  misc_feature (1)...(146693): n = A, C, G or T/U
tacaaaatatttttatccttataacacaaaaaaagagaaatctaaaacaatagtggtatttttccaagcaggaaaaggttttattgtcacccatctgttggttgtcttagttaggacctacctcatgttaagaatggtgagaagagccacctgtaaatgaaaagactaattggatcccgttcttcacagcagggctggtggcgatgtggggagaactggggaaaattttgtgcactcaagaatggttgctcttaataattggtaaggaaagagatgtgtcttcagtcccagcgcgtaactcatgattaggttgtagaaaatgtcaataaactcactcagctcttgtcttggtctatcataatgttaggacaaatatcaaagggtgtgtcactcttcaaagtctcagctcttagcataggggatgaagttcccaatgtatggattttgaggggtacatttaaaccacaagcaactgcttttcttcatgggacaaaaccatgtcacttggatgtgggaccgtttcttcttgtagtgtagtaactttgccggcttgaactacagtaatccagcagcttgctttggtcacccttcctggccctggccactggcagggaagcgctgagcatgcaatgagggtgttacaatgtgaggccaacacaaacattatgataaaggctttttcctttcttttttttaaagcctgcctgtcatctttatccctctgtgcccttgagatacaagttagagcctatgtgacagctagatacatgtggatatttaatgtcttccctcataacctttgagaaatatttaccctctttattagaggagcgcttagagctatgtcaaaaatcacttccacaaatattatgagccgagctgtatttcttccaatcataatgctggcatctcgacttcttctttacgtcagaatgtgattgtatttggagataagattaatgaagtaaaaatggggttgttagggtcatttatttgcatactttaaacttctgcatcatgtgccaaggccagcccaggcctggggatacatccgtctgttcatggctgtggatctatcttcgctgattggctggcttcgtgcatatcttgagctatgaaatcatgctgtacctcatgctagatcacagcattaatcttaatagttttaatgctctgatgtcacgatcttgaaattcttggtaacttttaaaagaatattattctttttaagttttttaattttcactttatgtgcattggcgttttgcctgcatttatgtctgagaaggtgccagatcccctgaaattggagctacaggcagttgtgagctgcaatgtggatgctgggaattgaacctgggtcctctggaagagcagccagtgctcttaacctctgagccacctctccagccctcttactaattttttgttgttttgttttgtttttcgagagagggtttctctgtatatccctggatgtcctggaactcactctgtagaccaggctggactcgaactcagaaatccgcctgcctctgcctcccaagtgctgggattaaaggcgtgtgccactactgcctggccctcttactaattttaaaacagggattctatcttttcattttctctagaaccttggaaatgacgcagcgggtcctgcagatggaaaccacaactttgaaggaatcaatcctatttttttctactgaggtgtgtgaactggtggcatggtgggggagttgggtagggggacaatgactataaagagatgaagaatgacattcagcacggggaggaaggggtggggggattggctgagcactcgctgtcatcacaggagtacaggaagacacagagagggctcctgtgcccttgctcttgtccctttaccctatcccagctcatcaccagtctttagtaacggagataagagtagcaggtctcctttcccaaaacctgaaagaatctaagaagtacacacataagggacgtgagtcctgatcctgagtccaccgcagagagcagaagttcttcagaggtcagttgtttcccatactctgcacagaaactgttcattcctttaaaccttccaattgtcttgaacttttggaaagtgaaataaaaacaaactgttaaactgggcataattccagcacttgggaggctgaggcaggagggctgccaggaatttgagacaatgggctacacagtgaattccaggacagctctggctatggcatgagatcttgtctcagaaaaccacagtgaattgccaggaagagaaaatgaaaacaaataacaaagacactctaaatataaacttagatttttttctcagattaaccagaaataaaactacatttaacaaataaaactggggcgaacataaaatgggaagaagagaattacaaaaataactttatttaatatgtccatacatataagtacagataatgtgagaagtgagttgtgttctttgcttgttaaaggagacattttagctacatttaggttgcttagattgatgacaggctacttgaaggcaatgcttagctaaaatgtttctgtatttttttttttagtaacactatcattactacagcaacctttctctcaaatgtatgaaggcaatgggagaagatacttcagtcaatacttacttttttttcttatgcatgtgggtgtttttcctgcatgtatgtttgtgtgccacatgcatgcttcgtgcctgtcgaggccatacaagggcactggagtcctagacctagagttgtagatggttgtgagctgctatgtgggtgctggggatcgaaactgggtcctctgcaagagcagtaatgctcttaataatctctccaccaccacccccactccgggcaataaacttttatccacaatgaaggaagcaatgctttattttaaaaggttatccttagtcttttattggcatcctgttttaaaagctggctcacaggattaaagctctattttaattgttttacagaaaaagaaagatcctggccaggccaggccaggtgtatttcagcttttatcccaacactcagaaggccaaggcaggtgtacttctgagttcaggttctctggactaagctgggtttcggggtctctggcctagactgggtttcggggtctctggccaaggctgggttttggggtctctggcctaggctgggtttcagggtgtctggcctaggctgggtttcagggtcactggcctaggctgggtttcagggtcactggcctaggctggattttggggtctctggcctaggctggatttcggggtctctggcctaggctgggtttcggggtctctggcctaggctgggtttcggggtcactggcctaggctgggtttcggggtctctggcctaggctgggttttggggtctctggcctaggctggattttggggtctctggtctaggctgggtttgggaatttttgctgtgaagcttattttggtggaaagtaaatattcaaaatggttagctaatccttaactaatttctttctattttagacataattatcattcaaatttggtgcttttattgccattgctaagagctatggctacaaataagtgggagactgaatttatttttattttgcagtacgtgagactgaatctggtgcccacacacactagacaagtattctgagttacatcccagcctggcaccatcttttttttttttttttaacttttttttattttgagagaggatctaattgtgaactcactcttggacccaagcaggccttgaatgtggaatccttctgtctcagcctcctactagatacatgagagactacagttctcagttaagtcaggagaaacccataggacttcaattctttggaataatttctgtgactattgtgaaatctactactactgctgttactaatacattacagatgtgtgtcttttactgacaaagtgagacaggctttgtttaaaaaaaaaaacctactataaaatccaaaagaaatgacaaaacttttacatccttaatttagccgtgagttttcaaaaccacgctcagttaaaaaaaaaaaaaaaaaaaagaaaaggactttgaaaataacaatgaatacttatattcttacagctttctacttattctgagtagcgagggtcaaactcaccttaaagtttccctggcatatgacaagagcacagccatcccacccaacagccccacacacgctgcagaccacctgaagacctcgagagtctgaggaaggaggtgtccaatagccaggtggcaaactaccagaaacacaaacactttaaatgccttttcaaattccttccctgcctccatttctccttcaccaccaaatcccctccgcacacaccccctctcctgggctacattcccagcgctgccccatttatttatttattttttgaaacaggtttttacattcatgatcaagaattgaaaaaaaaaaactcatttgcaatcgtattgatgaactaggttcaaataaaacaagtcatatctacacatgcagagctaatgtaagtccccagcctttccttggctgtcctgtgttctcatgtggccaatgccttattagattctaaggctgtaatgatgtctctctctgtctctgcctctgcctctctctctttgtccctgagtattggaatcactgttcctcacatgctaggtaagcattttactattaagttatatcccagacttttcactttttattataaaacagagtcttactaagttgcccgggttggagttcaactcactctatagccaaagcctgtcttaaacttgggattttcttgccttaggctctgagcattatgggcctgagctaccaggtcaggctcaactttgatctgtgtgttgaaaggggcttatgggggaaacatgttacaatgacttctgacacaaatagctgaccatcagctgatttgaggtcagtaccagcagagatgaccggtcaccagctctgttacgcgtctgaggacccaagttcctttgccattctgtctcaaacttaagagtagcttgccacaaataccaaggtggcatcaattggccaagtgtcacattctctgataattatgaggcaggactgtatcatttctgtatattatttgatcaggctcccacagtctatcttttatcttcaccaaacctagactgtatgtagcctgagctcttgcctaaatctgggacaaagtgaactcaagtgctattttaattccattcattctccgtggctgcatcagggcctggggctctacctcctgacaaacatttggtctctagaaggcttctgaagttaggcaagtctgaaaattgaaggaggcccatgtatccttcactcatctgacatcaaggcagaaaataagcccaggcttgcaacctacccaattaagttctcgattcctcagtccttgctcagctgttccaagatagtttacaccagaacaacaactgtattttattcacagcacttcaattagtgagttgtatgaataaggactgacaaagggagaaaattatgttgactgacaggtaaaacgtaactagaaaagctaccattgctgagccagcttttggtggcggtaggtagttctagtataaagtatgctcttttccggtgtctgtgcgtcggcgacatggtcagacaaatattacttgggttcgagtcctctgccagggacctgctatgtgacgcgggcaaattggctccccgaactccccacttccaacccgcaaaagtggaatgccgaccttcccagtttgaccggctgtctcggagaaaccattatgaaaggaggccggatcgtgcgcatgaacacggccaactggttttctgctttcgtctcaaacgcgtttgtaagcgatttttcaaagtcgggtccgcctggcaaactggttttcaaaagctactttcccgctaagatctgtcccgctcggaccgcgcctcctgtttccccatcaaaagactatagtctgtgcgtgcatcgcccatcttcccttgtctccagaaagccaccaatggccccaccctggaccgccnnnnnnnnnnnnnnnnnnnnnnnnnnnnnnnnnnnnnnnnnnnnnnnnnnnnnnnnnnnnnnnnnnnnnnnnnnnnnnnnnnnnnnnnnnnnnnnnnnnnnnnnnnnnnnnnnnnnnnnnnnnnnnnnnnnnnnnnnnnnnnnnnnnnnnnnnnnnnnnnnnnnnnnnnnnnnnnnnnnnnnnnnnnnnnnnnnnnnnnnnnnnnnnnnnnnnnnnnnnnnnnnnnnnnnnnnnnnnnnnnnnnnnnnnnnnnnnnnnnnnnnnnnnnnnnnnnnnnnnnnnnnnnnnnnnnnnnnnnnnnnnnnnnnnnnnnnnnnnnnnnnnnnnnnnnnnnnnnnnnnnnnnnnnnnnnnnnnnnnnnnnnnnnnnnnnnnnnnnnnnnnnnnnnnnnnnnnnnnnnnnnnnnnnnnnnnnnnnnnnnnnnnnnnnnnnnnnnnnnnnnnnnnnnnnnnnnnnnnnnnnnnnnnnnnnnnnnnnnnnnnnnnnnnnnnnnnnnnnnnnnnnnnnnnnnnnnnnnnnagctgcccctggccaggtgaggagcgcggccgccgcgggccggagagaagggaagggaagggagcggggacgccgggtgcatcccggcggggacgccgggcgggcgcatctcggcggggccgggctggcggtaggagcggcgccccgggtctccggggtccccttggtcccccatctctgcgggggtggcggcggcgcgctgacacggtcccgggctcgcgggcgacggggagggcatcccgaaggggtctgggctgcggcttgacaggtgtcgggcgggtggggctcctgctcccgagcgaagtgacaggtgcaggctctactccagcgacgcccaggcgcggagccggcgggtcccggagagccccggtcagatgcaaaaacaattgaaataaatatttaaaaaaagaaaaaaaaaactcgaccggtgtttgttttctttcttcctcccttttttctccgtggagatccgaagcacccccggggtgggttgactttctcttttgcagtcgtcctgcgatgcaacagttgggagccttgccctctctgagcttgcgctgcatcggcagcttggtcctgggagaggccaagaaaagccttgtaggcaaagcgcagggtcgtgggtgtcaattgctcacggggtcctcagctcccgggctttgtgggggtttctttagaacaatgctttgaggcccggggggatttaaagccatctgtggagactgatggagcagaactcttagaagaactggtatgtgggcaaaagtttcaggagacatttaaatgcaagggcttggaagtttctaaactttgttccccttttttttcagggtagaactcttcttgcgtgctgattggcccgcagcatgcttcattatttcttgccttttgcctttgagcattcacggattctggtgcctccccctcccttttttcttttttggtcttgtgtttggtactgtgttctctcaaagaacttttctctccatttattaagtggaatctaaacttaagttcatgtggatccaataagaacaacagagagatatttattgtatttcaacattttttttcttgactgtgctactgtgtgattaagtaacagaaattgaaacaatatgattgttgttattgtcagcactagttttgagagtatagatccattgtagatgggagttgtttttgtctctcacggtccttcaatttctagcccatcattaagttctcgagtttttgttgttgttgttgtttttgtttttttgggagggggtgtttttgttgtttttaattactctgactctgtaacccaggcttgccttaagctctctgttttactgcctctgcctcccaagttctgggattgtagccctgatgggctatcaagctcctttcttctcattgagcatcaatcaaggctctttgtgagacccagactcttaacagagttcaggtcaaatcctaagagactgaaataattttggaaattgcttgtctaagtctattaaaattcatattagatggattttcttatggaccaaataaaaatcatgttcttaaaaaataaatacagaataaaaactgttccaggggaagagtttgcttttgtttctaattaaactctgatgtatccagtgtgtggaagcttcactttagaaagagcagtaacatgtattctaaaagattccatgccatctatggacttattactgattattgtagagtaactgtacacattgaagttctggtcattgcctgtgggaaagacagacccagtttctttctcttttatgtacttttaactttggagaattctcaaaaagttctcctttaaattaaactttacaagacatagtctcatcttggttactcattgccactaaggttctcaaaaagcacttacagttgatctctgacttacctattgtcacgtgtgttcaccatagggatttgctacctcttctgaactgccattaaatgaatgttgtgttatcattggagaatacacttagacaaacactgatgatatatagattagtcactgtgctgtcttgctacaatcaagagaagtggtaaacactacagatacaaagctgctgccagtataacaaaacatgctgctatgcagtaaactttatcttttaattatagaaatatgctgaaaaataatgataaagctatagtttagtaaacacacaagccagtaacataatggcttcaggcattgtatgtccttgtatatatgattctctcctaccagtggcagcttgcttacagcagcatctccctaactgcacaagtagcaaatggattgtgccacaatgttatgctggttaagatgggctctaagtgatgtttctgcaccattataatcttacaggactactgttgtaaactgccttactgagtgacacatcatgtagtgtatgcctgttcttagcaaggataagagggctgcctcagtctgaagcttagaaaatagcttaggtatggattcaacccggtccgtctccactgagaataagtctgctttgacagctggggtgttatttcttttacactgtctctctcctaagtactacatgtggaagagaagctgagactaggagactgaaacacttgcgttattgaaatatgcagacgctaattatgcttgaagaaggagttgcccagctggaaaagtggtcaggagcacagatgatggagttaagactcatggttcatacctgggtaatttccacttggtatgcctctagtgactgctttaatttccctaatatggtagatgtgtaaaacatgaatgggaagacttaccaagtatggctgatgtggggactcaggaaaaccatgcataggatcatagtaaaatttcaagaattaagttgctcttcctagtgttgttgttatatgtcaaattgaaaggaattagccattaaaagcttacagttaagaaaggtcaaagagataggactgaaatacgtgatgcaatcatttctatcaagttaatcattaagaaatacaggaaggtggagagaatgtatggattgaccagggtgtggttttttcgtttttgctgtgacagttccgtcttcccagtgtgctttagctagtgcacttgctgtgtctcacaatgctgtccggctgctctggagtatatgtgcttcaccatgctagcagctcttcttcactttgtgctagtcttatttggaaaacccacaaaaaagataagcatatgtttaaatgatgtgtaatggttctcaaagataaagtaagaccttaaagcactcagagatgttctctttcaaaactgtgctggtgtgtgcaaactatagaaacaagtgtttgcttaattagtttgatctgcaagtgtatcaattttgtaactttttaatttgtaggcttgagtttgaagaaattgaagaacccgaatttattgcattatgtcaaaagttaaaggtacccgatcatgtcagagaaagagcttggctaacttgggagaaagtttcatccgtggatggaatcctggtaagaatgcttttaaagttaattttttaaaaagaaaatctataaagtaaaatatataaagttagtgataatttcactatccaagagtaccctctgatagcactagaatgcttttcatttcaatggtttcttaggtttttaatttttattttacatgaaaaaaattctgatggtgatggtgatgatggcagtggctgtggtgatgattctgacgatgataatgatgatggtggtggtggtgtgggagctgtgttccttctgcttttagtgaaggcctagggattgaactcaagttgccaggcctgctgggcaccaagtacccacaaccattgaactggcttcattttaaactgatatacaaagtaacgagtttcactgtgacagtttttgtacagatacaccattgttgttttctctattcatctcctcccccactcttctttcccatccattatcttccatttgctagtcccctgccacctctagacggcttctcctgcatttgtatcacacctgtgccacacacatttgtgtcacacactcttttcccctatgccttaaaactctcttcctctcatctccctttccaactttcgtgaccacacacacacacacacacactcacttaagttttagaatcttcataggagagaacatacttgtctttttttagtctgacttattttgacctccagttgcattcatttttgtaaggataatgtgatttcatttttatttgtggttgaataaattctattttatatatattgactggctttcttcatctgtgcatgggtggatgaacatctccacttgctctatctcttagctattcttagtagtatggcaggaaacatggatctctctgctgtcttgacgtcgagtcttttggacatacataagatagtggaatggcagttttatgtaacctcacactgacttgcatggtgtttgccctactctaccttactaccaacagtatataaggctctcttttcccacatttttgccagctaacatttgttgttttgatgttagccatgctgacttgggcagaatggaatctcaaagcagttttaagttgcatttccccatttcaaatttttagtgctcctatgtatatctttttctgagaactgtgtttagttggttcattaacctgtattttgagtgaatgatttgctttaataatatttaaaatttgaggttctttatcagtttcaatacatgctggtattgaaggtgtgccccaccacactcagccctgtgttatgtttaatcacaatctgtctctctgtctgactgtctgtctgtttaatgtgtgtgcatacatgctctcatgcactgcatgtgtcgtggtcagagggcatctttcaggagtcagtttttctgccgtatgggttctagaattgaatacaggttatcaggcttaacaattgcctttacccattaaagtatctcactggcctgatattgggcaaaagatattgattgagttaaacatctacagcaggtagatgcccaattacctcagcattatttgaagaggattttttcccccagtgtcaacaactaggtggctataaatgtataggtttaattctgaattctctttgttggtccatgtatttttatgccaatatcatacagttttgttactatggttttacagtatactttgaaatcaactattctgacacttgcttagtattgcttttgttactcagaatgttttgtcacctcatattagtttcatttctattgtgataaaatatcctgacaaaaaacaacttacaagagaaaggtttattttaaatcacaattccaggttatagtctatcataatagggaagtcaaagaggcaagaacttaaaacaactagtcacatcacacctacaataaagagcaggcagggataagtgcatgcatgcccagtactcatagaattttctctatgaaaatttatatagttcagaggcaaaaaccctagaatggtgttgcctactctcaggctaggtcttcccatttcaatgaaaagattgggtggggtctttccccagcaattaaggcagtcaaggcagcttgccatagctgtgtccaaagaattcctgaagactcccttcctagtaatgttacactgtgtcaggttggctattcaaactaacattgctaaggggcatcatcctagttctgtaaagaatgtcactagaaataggcctcgcattgtattgcttataggtatttttggtaatgtaactattttcacagtattaattctgctaacccaagagcataagacttttttgtttgtttgttttttaattttctagtatcttcatcttcttaagggttcttaaattttcactgtagaggtcttttactactttggttatgttgattcttaggcattttcttttttgaagctaatattttttgtcttgtttgtttgttgttacaaggtcttgctttgtaattctaaatgatctagaacttattatgtagaccaagcagccttgaagcacagagatcctgccctgctgtaagtgctgggattaatggtgtgtaacaccatgctcttgaagctgttaggaatgggatcttttcttttcttggcaagttagttattggtatgtagaaaggtacttatttttgcttgttgactttatattctgcagtgttgaaagtatctaacacatctaagagttttctactggagtctttaaaatacaggatcaaataccttcggcaaatagagatgctttcttccccttctatttgcatccctttcatttctcgttttgctgctctaacgaggacttcaagcattatagtggagaggagcagtaagagtgagcaccttttcctcatccccagttttagaggaaacactttcagtcattccccaattagagtgatgctttccataggtttgttgagtagagctattattgtgttgagatgtttcttatatttcttgtttccccacgcatgtgggtggtgtgtgggtgtgtattcatgtgtgtgcaggcgcatgtgcatgtgcaagccagagacagcttccagtatgtccttcttcaggtgcctctacccttcctccttttttttctctcttcactgtttttgttttgagacagatttccacaggcctagagctcagtaagtaggctagactggatggccagtgagccccagtgacctgcctgcctctctaacaatgggattacaaatatatgctacatgcttggcctcatttattcattcatttattctattttttttttatgttcatgctagcgatctgcgtccggcactcatgcttgtaaatcaggcactttagcctctcctcagaaccttatcaagaagggatgcagtgaggtaacccaatcacaaaggaactcacacaatatgtactcactgataagtggatattagcccagaaacttaggatacccaagatataagatacaatttgctaaatgcatgaaactcaagaagaacgaagaccaaagtgtggacactttgccccttcttaatggaaggagttacagagacaaagtttggagctgtgacgaaaggatggaccatctagagacggacatatccggggatccatcccataatcagcttccaaacgctgacactattgcatacactagcaagattttgctgaaaggacccagatagagctgtctcttgtgagactatgccggggcctggcaaacacagaagtggatactcacagtcagctattggatggatcacagggcccccaatggaggagctagagaaagtacccaaggagctaaagggatctgcaatcctataggtggaacaacattatgaactaaccagtacccccctggagctcgtgtctctagctgcatatgaatcagaaaatggcctagttggccatcagtggaaagagaggcccattagtcgtgcaaactttatatgcctcagtccaggggaacgccagggccaagaagtgggagtgggtgggggagtgtgtgggggacttttgggatagcattggaaatataaatgaaataaatacccaataaaaaaaaagaaaaaaaaaaaaagaagggatgctgctaaacattgtcataacctttcttgctgctattaatataatcaggatttttgtctttaagtgtatgtgtgggttatattaaatatcagtttttgtatgttgaattacctttgtgtccctgggatgaaaccagtttggtcgtgtgtgggtgaatttctttgtgtcctacgaatttgatttgcaaaaattgtattgagaattttgcagggaaattggtgtatggttttcattttgttgtcttatctgtatctaggcttgatattaaagtagtattggtttagtagattgagtttagtagagcctgctcctttctgttgcaaggagcagtctgcacagggtggtgagaggtgctgtttaaaggtgtggcagtgacgcccttggcaatgggttctcctcggaaagaaactttttacactgcctcagtctcattgctttctgaggtcagtttcctcacctatcttttttatttaattttggcaggttatatagctctaggaatttatgctgcatgtcttctagattttctaggagcttgagggaggaatgtaagctgtttcctttctggattccatcagagcctgtttttatctcctttacatctttatttttaatttggttcttctgttttttgtttgtgtttttttttaattagtttgtctaggatttttttgagtcttatttctttccttttttttctgagatagggactcataaagatgaggttgactttaaactcattatataataaccaagggtgaccttgaatttctgagcagtgtcctgagtgaattatagggtgtgtcccctagctcagaggtttatccagtgctgggcccaagttcagggccccatgcatgctttatcatgagaattttcttagattattaaattatatcaacatataaactttatttggtaatagagtttctagtggtaatataacaaccactggagttttaaaaaattaattgttggatatatagttttttccaagtaacttgtttatgctgacatatccttataagaataatttctgcataagcaagttattgataattgtaaataattaaattaatggctctctgatatctttctttgaataaattcccacaagctaatttactgagtcaaaacctacaaacttttaagactactcaatactttatttctttttatttgattattaaagagaaagtgtctttagtttggaattagatgtttttaaagtagtatatttaaagtctccaggttaccctttgaatgatccttgttcaacattgaaacaaatagaggcaggcacggtggcatatggagttggttcagcagttcagagtgaggaactgctgttctcattgagaatctcaagaagacataggtggagacctatgtcacgtggctcatagccacctgtaactcagtccattggcaactgcagttatgtatatacccctaaacagacacacatgcacgctggagaggtggctcagcagttaagaatgctggcttttattccagagaacctgggttcaattcttagcatccacatggtggctcacaaccttctataactttagttccaggttatctgatgtccttttctggtctctgtgggcactagaaatgcattggtgcacagatatgcatgcaagcaaggcaccttacacataaataaaaataagtaaaataataatgtcttcaaaaaataaattgatgcaaatagtaatggtccctggaaactccaaggataagaccctcctttcttagacatctgggtgaatcacttctgtaaacttggctgcaaactacagaacttaacagacagggaattatgtagaaaatgtgaagttcaaggttaatgacattaacctcaacaatataatttgttaatatacaccaaccaatagtcaacaaactttacttagaaaattcctttggggagtgggtcagagtactgactgtacaaaatgaggatctgaatttgaatttccagtacacaacttaaagaaatctaggtgtggcggtttgcacctgtaacctcatatctctctctctctctctctccccccccccctctctctgtgtgtgtgggtgtgtgtgtgtgtgtgcgcgcgtgtacacacgtgcatgtgcttctgtggtgcagataggtgggaggatccgtggggtttgctggctgccagtgcacctccaggcttaatgaaagaccctgtatccagggaatatggtaaacaatgacagagcaggacacctgattctttttgctgttctctgcatgtggtttctcgcacacatacgtgtgtataccatacatacacactgaagaaaattaatgaagaagaaaggcccgtgagatgggtcagtgggtaaaagtgcttacagaagtctgatgatctgagttagttcctatataactaacccatctgagttagttcctatataactaacccatctgagttagttcctatataactaacccatataatggaagggatggcctgtcgtcacagtgctgttttctgaccttctacgtgcactgtgacatggtcacatccccatacacacatggtatgcatacacacatacatacacacactggtaatctttaaatatttttaagctaaactagaagcttcctttatataacccaggtacttgggttataagacaagctattattccttgaaaaaataaaataaaaagctggtttgtttatgtggatactatagctatggtaagggtggctgctatgtgctgtggcatgcatttggaagagttctttccccccttctaccacatgggcctttcctggggattgagttcagaatgtcaggcttgctgacaagtactttgattagactgagacaccttgctggccagcctttgttttataattgctatatattcattatatggtaatgggtttcataaaaataatgtatctcaagtctgtcatattctttgagactgttcaaccctcactattctcccttcctccctctgcctgctcccctcttgcattggtttcttttactgtcctagtcagctttctgatctctcattaagtatatataaacaagtagctttctgtgtgtatgtaaaatctaggatccacaaatgagggaaaatataagatatttatagttctaagtctgacttaattttctttatctgatgactcagtttccagcaaacaacatgattttgttaactaaaactctgctgtgtatgcataccatttctttatccatttatctgttgacagacatatagactgataacatattacagccactgtgaccagtgcttctgtaaacatggatgtgcaggggtatctgtagtatactgactttgtgtcctttgggtgtctatctgggaatgggtatatcatatggtaaggctggctcggccagttcacattcccatcagcagtgtataaaggttcgattagtagcagaaaccattttgggctgtagaattaaatatatacaaataaatgtgactgctttcttgccttacccccttctcttcctggctttgttcctacctttccgtaggactgcataatttaaaatattacttcctagtggaggtcatgataggaattagaatatatgaattattcctggttgtgtgggggaagaggacaatagaggactttgtgttacttttaggacttgatacattttgaagggtgtggaagactattcttttgtcctgctgtaattcaacaaaccctttctttacaatatgcgagtgtttaatgttgagagttggcctaagaatgatggaatgtgttcagagaagcaaatgcaaagacagaatgaacctgtttgcaaagcagctgttgtggtcccagttgtctgttctctgaaacaagagaaatgtcgtaacttgggggaaccctttttggcatttgaaagtggatggtgtttattgagagaggatgggttaagatttctagtcagaatgagctgtttcaagtctgaaataaagcatgtggtgacgccacactcttgagcaaatgaccttaaatgtccagtccttggttttctcattcgtaaaatgggctatcagtaatttccagatcttggaatcattgtgaatataaataagttaacacatattaaatatatgcaaggtaatttattgagtcaaactctacatagtttttgttctttaaaagaaacaaaacaaaaaaccaaaattctatcttatcctgaaagactaccttgtgggcatgacacagccaatgcaatcatgatctcacagtggcagcagctgccatcagtgtgcctgcacaggcctgggcttgtcaacagtcagtcatagatcggtgagaggcccatttggccttacccctccctgctgaaatatgagctactgatggatttttggggaggggccgacactgtcttcagttgtgtactcgtgatgagttcaccgtgctccagtgaatggtagcaaactcaggttgcactggcatcccttgttaaacgctgggttacaaaacaaaacagaagggcctgagtgtgagaaggggactggccaggagggagtgtgtactggatgtcggagggaaatgagaaggggaggatgaaaatagccagagtacactacccacgtgtatgaaatggttacaagaacaaattcaatcagaaattccattttaattggcacttgattagtacttaaaagacaaaccatctcgatggctcagtgggtaaattgtttgctgtacaaatgtgagaattcagttgtctcctttacacctgcctacctaactcctgacacagctgcaacacttatgtgtaaccccagaattgagagacagaaacagatgaatcctggggtcttggtagtcagccagcctaatctaaatggccagctccaggctcagcgggagaacaggtctcagaagaataaggtagaggtgacagaggaagagatccagtgtccatctctggccttcgtacatgcatacgtggatgagcacacatacacacacatagttaaaaggaggtaaagcaacttcagtctgggttcaggtggatgtgttcaagagttcaatatctatggcagctatagacttacataatgtttcttaaattttgatttagaagtcagaattattccttgatttatactgctgatggaattttaatccagtgggcatgaaaacaatattacctggtacatctcttttagagccctagggtggtcaagtacattttcagttaagcaaaaatatttttaaagatttttctcttctcatctgtaggtcttcagattttaacagcaggcgtctactatttaataaaccatgctgtaagcacgcatactgtcatccaggttttgttttatttgttaacggttagtccagcaatggctgtctctcaaaggaaaggctgaacctggtagttgtttagtccatgaggatacatgtttcaacttgccaggatgaatgagggcaagtgggcaaaccccaaaacttactgttccatgtccttttatgtgggctgtcactagaaagtgtgaccctcccatctcaaatgatccaatcaagaaaatccctcagaggtgtgcccagctgtttgtggttttgttgttatattttattttgtttttccaagacagaatttctccgtatagctctagctatcctggaacgtgctctgtagactaggctgtcgttgaactcacatcagtctgcctgcctctgcttcccaagtgctgggattaaaagcctgtgtaccacatacagcctgcttttgttttagtagattcaagatgtagtcaggttgacacctaagagtgtctatctcacacttctcaagtctaatagtttggggttagaataagagatacatgccactttttttcagttgaacaaaaacagtatatacttattaatgagcctagtttcagtttcatgtctcacagaataggggctcataaggagattaagagagagatgagggaacagtatgttggattttataacacatatttattatgttcattgatttatatgggtataactcaatggctccctgaaacagttataatcatgtattaaagataagactgtggatcaccataaggtatagtaataatgaaaataatgccaagtattatgagagttatcaaaatgtgaccaaaaaatgaaactggatatagaaacatacatttgtaatcctggcattcaggctgaggcaggagagtcacaagtttaaggttggcttgggttttttcttcattatttactcttctgttgctgtgataagacactatgaccaaggcaacttacacaagaaagtctgttgggggcttacagtttcaaaatattaaaagtccatgaccatcatggtgggaaacatcatgatagcaggcaaacagatgtgacattggagcatgcagagagctcacatcttaagacacaaacacaaaacaaagacagacacactgggagggtaagagtcattttaagcctcaaaggctgcccccagtgacacactttgtcccaacaaagccacagctcctgttttttccaagtagttctaactgggagcaaagtattcaaatatatgagcccatttctattcagacttcctagtgaaaccgtgtcacaaaaaacccaaaccaatcaatcaaaatgaagcatagagcaagcacattgttttggaactgtggtgccagtagacttgctgtagagaaagtagccacagttacaaaaatctctacaggtctgcctgtatgcctgtagaaatttattttggctcatggttctagagagaaaagtctgaaatcctctgtgtcttagcctgatgaaaaagcaggggaagctggagcaggcagaagagagcctgagggacagcttcactttctaagaaccggctcttgcgctcactcagacatggacccatcacagtaggacagattcccatggtaatgccaattatttcttcagtgccttaaccatgtcttaatgttccaatcccccattactgtcatgatagccttcagatttcaagaagagtttcagacaggataaagggcattcacaccacagccactttcgtgtactcccagctctgcttaaccatttcttgaagagcaactgctctctagttcctactgcttgttctgctgttgcagttgtttcttagcaagttaatttgagcatttgtgtgactcacacttaagattcctgtcttttaggggtctgagtccttctgtgcttagtctctaagtgtcttgagttatttaattattccccaactttttaattgtgttatgccaaactctagttttgatacttatttttttgtgccttttctttgttaaaattcctttcaaattagtatatttgttagttgatgagtttacatttgcccatctttgttacttctaagtccatggtgtttacatgagggtttgttctttatgttaaatggtctgttgattttgacaaatgtctaatggtatgtgtctgcgattatagtacatatagaatactttcattgctctacaaatactctttgcctattcatcctgaatttgcctatttcctttcaacctgtagtaatcactgttctttaaaaaaataaacaaaaaatattgctttgcattttctaggatgtaatatagtagccaaacagtatacaacctttcagttgggctctctcacataataatatgcatttaagcttccacatcttttaatgatttggtagatcatttctttttagtgttgaataataatattttgtcatctgtttgtgccacaatttatttatccattctacttccaaagggtattttggtttcttctacgtgttagcaattatgagtaaagctgctataaacatacatacacatttttgtatgtatgtgtttatacattcatgtgtgtacccacatgtaatcacatacaggccccaaggtcaactttgggtatcactcactacttaggctctgtttaccttctcttttgagcctggcccagaatttccctactagggtaagactggcatccagggagctcggagtcagtgcttacacctccgtcatttgggacttcaagcacgcagcatcatgcctggcttttcaatgtgggttctgggagtcagtcttgggctctcatgcttcatggcaaatgacttcacttgctgagccatcttcgcagctcccaagcattggtttcaagacaggatcttgctaagtcgcctcggctggcctcacactcactgtgcagcctaagctggccttaactcccgattctccggtcttctcactgccaggagttatagcttatgctaccgtgccaagcttgtgcagtgtgtgtgtgtgtgtgtgtgtgtgtgtgtgtgttattggagatggaacccagagctctgtgcgctgtgggaagcactcagctagcactgtgccagatttctagccttgctgctttacctttacctcctacttcctgagccattgttactagttttgtgtgatatgggagggctaagtctggaacttgtgtgtgtgtgtgtgtgtgtgtgaagatgtataattgctggcactatttcctgggaaggtgtctctttccatggtattgtgttttgcgtcttcatcaaagactattattatactaggctgcggttgtgtatcttgatttctggcctctctatttcctgctgtctctctatgtctcagcctctcttttattactgtgaagagacacaatgaccttggcaactcttaaaagacaaaacatttaattggggagttagttacagtttcagaagtttagtctattacatcatggtggagaatatggtagcatgcggaccgacatagtgctagagaagtagctgagagttctgtctgcaaacacgggcggaagagatagagacagatggacagacagacacagacactgggcctggcttgaacttctgaaacctcaaggccacacttacttatcttctcaagtactactattcccagatgactaaacatttaaatataggagtctgtggaggctttcttattcgaactaccacattccattccttaggtcccataggcttgcagctacatcataatgcaaaaaatccattcagttgaacttcaaaacagtattatcactgcttaaaagtccaaagttcaaagtcatttctgagactcatggaaaattttgtaatccctataaaatcaaaataaaaaatcatatctcatacttttaacatacagtggcacagaatatatattaccattacaaaagggaagacagggagagtagtgagaaaatactgggccaaaggaacaaagccatcacgtcagtctccaagtcttgtatctgcacctctgatgtcaaagtgcctttcagatcaccagcaactttcaggtttcttgccgacaacatacttctttcacttggactggctccatgccctgtatccagctctcctaggcaggtgtcccacaacttggcatttttgacatcttgggtgttctaggataatccaggtttcacctttacaacttcaagcagttgcctctctaggcttccatacagagacacccctggtgcacacgtagctttagtggctttccttagctgctgggggagttccacaacccctttcttgtactcttgactccaaagtcagaaccacatggctggagcggccaagttctgctgcttctgggcttggaacatgctcccctcatttagttacatctacattctcttctgttgttgatgggttccttcacttcttaagccctttcttcaattcctttttcacaggttgaaagcttagctggttggcatctttccctgaggttagagtttccgctattccatttatcatcaggctattctttaaacctttttatctccttgagcattggacttggcaccaacatttcatttcctgatgctccccttttctcctcaagctataatttttctatttttccttgctcagcttgatcttttcattataaatctgcataagagtgaccacgaacaaccaagtgacagagtcagtactaagctctcttgaaatttctgccaacatcattaacccagtttagcacaggcagcttttttggacaataaaagaaaccacagtgttcttcaaaatgacacaagaatggtctttgtgtcacttactgcttccctttgaagcttcttgaactgggtccctacagcccttcgcaccactgccttccatgctcttacttggatggctcattaagccctgcttaaagcacctttgggggacatttctattcacactataatgccttgttgattttagaatcattttattagatttatagatcttcttgattatttaggtctcttattttttaattagacttttatggttcccttcaggctgattttgtatagactttattagctttatatctaactattccactttagatgctcatgtaacacacacacacacacacatacatatgtatgtatatataatatacatatatacacacatatatatatgtgtgtgtgtatatatattccttcctgactggcctggagctcactatggccagggtggatgcaaacacacaaaaatcaagagttaaaggcatgtgcaccacattctgcttaattgtatttttttttaattgcagtctatttgttgggatatagcaaagcagttgggttttgtgccctaaccttgtctcctgtatccttgttagaatgtttaatagatctcattgtctctattgagtctttggggatttctgtagaaatgattgaataattttaaataaaggcatttttgtttcttctcagtccaaacaacttttaatttttctttttgttttattgcattaattcttgaattctgtatgatgtcagtgtgtggtaaaggataatgctgataccatgtttctaccctctcatcaataaatatattagctatagattttctgtgaagattctttttcccctttttattgaaaacagattccccccctcacatatatatcctgattaaggtttcccctctctctctcctcccagtttctctccatctcccttcctatctggacccacccctttcctttctcattaaaaaaacaaacaggcttctaagggataataataataataaaaaaacctaacacatcagaattggacaaaacaaacaaacagaaggaaaagagcccatgagaaggcacgagagacaaagaccctctcactctcactcaggaacgccataaaaacactaaactgggagccataataagggacctatggggtaaaacaagagaaacatgtaagtgaaataaaataaaacaataagattaaaaggaaagaaatagagaagccttggcatgatgttatgagacacagaacctcagtgattaccgagtcgttttctgttggcacctactgctagcatgcagcctacctttaagaggagtttgtttcctccagtgagagtgagtgccttagaggaaattacacttacattggcaagtaggtatcagctgcatattgcttctgagttagggatggggacatgtattctctttttctttcagctactagggaacatagcctgagaaggcacaagagtcagagacccactcgttcattcactcaggaattcaataaaaatactgaaatggaagccataaaatacacatggagggccttactctctgtgagtttatgtgaactttgatcatggtgatttagagggtactcttttcttgaccttccaactcatctggctcgtacactttttctgtctcctcttctgtggggtcccatgatccctgaggggagagattgatggggacttcccatttaggacattcccttggagtgttccaaggtcttctactttctgcatcatgtctggctgtgggtctatgtatttttctcatctgctgtaagagaagacttccctgaaaatggctgagcaaggcactgatatataagtatagcgaatgtcattagtagctttgttttattgccatactcttttagtggaatagtaacatttggttttatcctaggagcttgagctatctaatctcaggttcttagtcattcaagcaaagttgggcataggttccatcttgtggagtgggctttcagtcaaatcgaatgttggttggttactcaaacaaacattgtgccaccattgccctagcagatcttgtaggtaggacaccattgtagatcaaacagtttgtagctgagttggtggttacatttctcttttggtagtgcagagtaccttcctatagcaaagatgctagactgtagggatgaagacattatgtaggcaccagctcaacttctccatggtcagtgggttgtgtgggtgttgtcttcagcagtggggccttgctatcagtttgtgacgaacaacctatagtcttggcaacaatatgggttgtttggggttcccatggcactcctttggccaactcaacttacatcaactcaattagatgtaacccaatcttggtactggaagattcatttggtgacagaggatgtccacttggggatctgtctccctcattacttggtgattttatttaaatcaccttcgtatatgtatatattttagggagcttctactgtattaggtttctatactatctctcaaatagcccttaattttggttgtttctctccacattccttccttcatctccctctacatttgatcctcctggtcctgcccaccccccccccataatgataatgtttccctttcctagggaggtctatccatctctcccttaattccttaccttgtacgtaacctctgtagttctatagagtgtagcttggtcattattgatttaacagctggtattctgaggatagtctttattaagttgaggaaatacctcttaatttatagtttgctagatattttttaaatcatgagtgaatgttaggagctaaattctaggccagttatgtaccctgtatagaaaatgaggcctgtcagtcatttctttgaattatttggataagcaattaattgatttgctattagaatgtggatgagatctaaagaaaccagggtagaatcaacagtctttttcttgggcgattctattgctacttgcttttctgattatgttaagggaaaaggaaaaaaaaaaggaaaatctgaaagctactatatcctatgttaaggcatagacgttgttataactttaaaatatttgcatttagtgtcattttagtgctgagtagtgtattagactctgggggggtataatagaaattagaattttctgttttcaagacacttataaatttgttgagatggaggtaaaaataagcaagcaagtcagacacagacaaggaagagctgtaacactgagatctgtatccagtctttaaggaaggaatcttggttgttcatcatagggtcaggtaagcctgaactttccagatccatgttttcctggagtagagctaactccacactcaaatctaccatgcaactagatggttaactcacctgctctctaccccagtgtgtcttgttaaaactgattggcgggctggtgagatggctcagtggttaagagcacgctgctcttccagaggaccaggtatcaattcccagcacccacatggcagctcacagctgtctgcacctcctgtcccagggcatcttattccctcacacagacatccttacaatcaaaataccaatgcacatagactaagactaagataaataaatttaaaaacacaaaaacaaaagctgcagctggctaggtatggtggcacacacctttgatcccagcactcaggaggcagagacagaccaatcttttgagttggaggtcagcctgctctacagaccaagttccaggatagccagggctacacagaaaaatcctgtctcaaaaacttaaaaacaagccaaaagactgtgattgagtgaagtgggttagcctttaccttcctttgtgactctgccactcctgcatcttctgtgcatagtcaagaatgccttaaatactgactgctgccagctcaggctgtataagtaggatgagtttcctgacatattagtatcgtatttcttttgttcatatataaaacctaggtgaagaggaaacccaagcatagaaagaagtagctctcctgtttcaagactttctattgcacacccaatgcttaatgcaaccttgctattcttgcctggaagagtacatatttccatatatgtgctagtagtttactttcattacattttacttattgtgcgtgtgaaggggcatacgtgctatgacctgagtgtggaggtcagaggacaatttccacacgcatgtcatggcacatgggagctctggatataaaagtcaaaggatcggctttggacaagagcgtcttttcctgctgccaatctcataagacttttttaccttgtgaaattacagctgagatttatgttcagctagctttagttgttaggtttttcacactgcagtgatacttactgtcaccacttggtggagctctttggtaagtgagaacattgtcaaaaagcaagctcaaataaattgtcactgatttggggttgtctttaaggtggttcagaggaacattaaatcacatagcagatagccatgtaaagtgttggctgtatattttgatttaaactgttaatatataattgaagttttgatattttaataattttatcatatttctgacttttctatcctgcttttcataaatttagcagtttttactgttgcatcttctttgttgcagttgattttaattaggaatatatatcttgaattaatgaagaaaatgaaagttgattatgatcctaatagctctagaaataagaacccactttagatatattataatcctttccttaactttttgtttatttttttttttttacaaaattggaatcaagaaatacaaataattttgtagatttttttctctcacttaaacattgtaccttgggcatttcccatgtgcttgttctggtctttgaaaatgtcttaggattttgtgtaaccccataattcagctatagcattgtttagccattctattttaagatatttagacaccccactgttatggggtatgtaagtagctattagaacatctgttacaaggatcttgtcccagctccccagttattttcactgggtggattcttagctgtacaactgaatgtctcaaaacatcatggcagcgtattgttcagttgacattattctaagatttgacatttgctgaatctggtttttgaaaggtaagattttttttccagttttgcaaagtccacttcctccacacacttcctccacaagttttacctttttgtgtgtgatttcactgagaaatagttacttttttgtaaataattttaagtgctgttttggactccctttaataatttttaagctttttaaaaaattatgtgtacttgtgtgtacatgcacaggagtggaggtgctcatgcaagctgtagatcccaggtgccagtcagatcaacagttgtgagccccctgatgatgtgccaggaaccgattttgaattgtctaaccaagtaatgtacactttggacgacctctgatctattcttccagccttccttttataatttttaagaaaaacattttatttgcaagttctttataaaaaggtttatgcaattacagcaaaacaaataaacaaaaacaaacctgttttcaatttagttgtaaattggattggaaataaatcctgtagctacccagagccactgtgctacaaagtagcaagagaggcggaccctctgtttgcagataatggcagggctgtgggagtgggcggggtgcttattaaaggaaggatagcaacgggtaggagttaaacacagagatacaggaaagagcacaaggatattagaggactttagaagtaaggaaaaaaggctcacagtggtaggttgaaggagaaaaacttagtgcgactcttcagccatagcattaaaatagaaattaaaactatgagtttaaagtatagcatttctggggaagctgacagaaaaatcttgactcaaactccattaaaaatatccagaacctttaaagctatactaatggagaccttgtggtattggtgcaaaaagaccagtgatccgtagatgagggcggcatggacactggcacgaggacacatgcgttgtccgttcattttctagcgaggcgcaaaggtaattcggtagagggagcctgttcttttcaaccttgaagctggaccaactggctatctgtttgtgacacttcacttacagggtttgggaggtggctcagtgggtgaaggttgccaaacctgatacccgcagttggatccctggatcccacatggtgaatggagaggaccagtttctgccacgttgtactcaaacctttaccagcgtgatgtggattgccaacaaatatgaatttaaagaattttctgtctcatagtacttagaaaaattagttcacatgaaccctagacataaaattctagagcaggacatgtaagaaatcagtgtggaactgtgttagagataagtttcataaatagcatcactaaaaactgaaccagaaaagaaaaaaaatagtgaaaatttaaacactctttctctgtgaagtacacctttaagaaaacgaaagattgggacgagtcagtggataaaacccttactacatacacatgaagacctgagttcagagtacccatagccaagcacggaacactaaccccagtgctgggagaggccagctccatgactaggcagtctagctggagcagcaggcctaagggtcagtaacacacacacacacacacacacacacacacacacacacacatgactaggcagtctagctggagcagcaggcctaagggtcagtacacacacacacacacacacacacacacacacacacgactaggcagtctagctggagcagcaggcctaagggtcagtaacacacacacacacacacacacacacacacacacgcaagcagcaggcctaagggtcagtaacacacacacacacacacacacacacacacacacacacacgcacatgcatgcacgcacgcacgcatgcacgcgcacacacacccgcacacacacttgtacgcacagagagagagagagagacatagagagattgattcagttgtagggctttattctaatacaatttgaggcttttagggaaggggatgtagctcacttttagtttgtttgcctggtatgtgtgaggcctgggtttcaatttccagcatgacacaaaaacctttttctagtgtttaaaaaatgaataaacagtataataatgtttgtcggttttagttactaaaaatgtgagtgtgagagttttcttagaaaaggctgtagtagctataggcaggtctatcgaggacagttatgttcaacagggggtaggtggctaggggcaaagaagcagagaggaagtgagataagtacacttaaaaattccagaagtgaggattaaggagttatagcagcaagcagctgtcatatcttagtagtttctaagaaattagccttattaagaaacataggcaacaaggaggacaccaaaagacatgctgacatggaaaggagaagctcacaggaccccaaccctgcatcagatctacaggcaactaaggaatgctgaggcgggccaggtagtctctcccagggaagagcacaccaatgggtatccagggccagatagccagcccttaaaacatgcacttacagttaaagtacaaaatgaggaggtatttatgtacttaggaacacaggtagacatacacataaatacacatttgcagcagttaatgaaaaagagaccatgaatttaatggggtgagggtacatggaatgggttgaaggagaaaagggaaggggagatgatgtaattatatcaaaatctcaaaaaaatttaaaaacaggcaaaagttgatgtttttattttctgagaccatataattatcattgtaatgctgaatcaatacacacacacacacacacacacacacatatacacacacacatacgtacacacatacgtacatacatatatatacatacatacataagtatatgtgtgtatatatatatatatatatatttctgtttcagtagtaggatatacgtaacagtttctgaatcaaatttattgagttgatggagatctattcccatataatgaccaccagcaaggatgaaagcttcccgagcacgccagaaggttctcttcccctctttgtggtcattccctggcacctgacctcgtgatttgagcagtgcttacctagtgtctgacattaaatacggctttaccttccctggaactgtgtgtgcacagaatctgtgctactgttttgtgtctagcttttccttttttgggtgactttttctcagtgtaataattttcacttatctgtgttgctacatttagtagggccttttcttttttgttagatagcatcagctgcataattctattacagtttatttatagaattaacagtttgattatttctgtttggttctatttctattatatttggttggtttctagtttggaattatattcattagtagtgttttaatttcttctgggcataagtattggggatagaatttctaagtgatatagaaaatgtatatttaaatacataaaaactatccaaacttgttttgcaaaatgatcatagacattttaccacttgtcactggattcagttgtctcattccacttcttccttaccaatcatcaatattgtaatttgttttaatttaaactattttggatgtatagttatattttaaagtatttatattagaaggaaaagtttatagttggacaatggtgaattattgattacccacaatcatttgatactctagatcctctcattcttcccttggtacatgagatgcacatagtgtgtaaaatgccttacatctgcttcctcagcaatgcttctatctccttattagaccagagataatctgacacaataggatccagattttacctacaaaacatacatttagagggtggcatatttcattgagggggtatactgaaaaatactctacctacagtgttactcattgctcatcagttactaaatgagtgctgggctatggtcaagggtttaaacatagcttcatttaagccttgtaaagtaatgtatgcatgtaatccattgtacaggtggcttagttgagaaattgcacaagcccagaaaattcttgactgaacaaagggaaaaaaatggatgaattagagcaaaagacatacgtatactctgaaaggaagtcagcttttgttttcctggaaaaaacaagttttaaaaaattttagaatcttttaatgtggctttaatgatattggactactaagaaaacaaactttcaaataactagcttactcaaagtttccaaaggaaatagtaatttaactttttgaatctcctcataattttttccttataataaaaattgagtgttatattaatgtaaaattaaatattttcaagtatatgccattataagaatttaaaattacatttttatgtttaatgaaaaaatcctttgtaattcaattttaacatggtatccagtgtgcagatgatttaataaaatacttgaacctttttattcctaggaaggatatattcaaaagaagaaggaactctggggcatctgcatctttatcgcagcagttgatctagatgagatgccattcacttttactgagctacagaaaagcatagaaaccaggtaaaagctctgactgaaaatcctgaagttaaaaagggcttctaaagttttaattcacattaagaagttggtggaaatgctaaaattaaatttaatataagggatttgggaccaataatgaattttaattctctgctgggatcagttaatgcttacttaatttgggggcagtatttttttaagaatttattattttttattttatgttttacctacaggtaagtgcaccatgtgcaatgcttgaagaggccaggctagggcatcagagcccttggagctggagttagaggtaccgtgagtcatcctgtgggtgctagggaccgaacatgggcacctgaacataccaaagacaaacacacacacacacacacacagacacacacacaatcacatacatacacagaagtgaaaaaataaaaatcttttaaaatgtaaggtgtctgggttttttttttgtttgtttgtttgggttttttgtttgtttgtttggttttttgagacagggtttctctgtgtagccctggctgtcctggaactcactctgtagaccaggctggccttgaactcagaaatccgcctgcctctgcctcccaagtgctgggattaaaggcatgcaccaccactgcccggcctaaggtggctgttttaaatttagataaaatttatttaagttgaagactttagcgtacgtggatgttttaattacataatcacataaaactgccatatattcagtattgattgacacttgacccaggcatttaacattttttagctttaaactttattaatttgttctctagtaacttgtagattttcatcttaaactcacaggacataatgttatttcctttgtaacatatttacaaaatacagcagtaagtaattttaccagattggtaaatagatgtatatcttcagtgagttgatctataattcaacataattagtattttagctaaactaagtagattaaatcattacatttatagcacttttttactacctttaaataaagtgtgaaaacaaaggctttgtgtgtgtgtatacatacatacatacatacatacatacatacatacatacatggcatataaatagcacaagagtcattgtctctaataccacaggcactgacttcccatcccttctcttaaactaccccagaaagagacaactttgtttcaggattttcgttttatttctgtggtgctcggcccctcccacgacgcttggggtacccctcataagcacatgcactgctccgaggttttctttttttctggattctacacatttacatgatgaactcttctgttcttccttctctctcaccctctctctcttcccttctcatcaatacagcataaataaatgtaaagcagaggccccatgagaggataacagttcattctctgacccagtccttcatggttaacctaactttagcatttctcactaactccctaaactgtattgatggaagttcaaagcagtttccagtcagcatcttgatctctgctgtcttctgccatccctgcatccttctttactgtccacgtaactatcagcactgctttacccctcttggcctgaacactttgtaatatcctctgttatgtggatttttgcctcctgctgactatctcgggctcctttggttggttggtttgaggtgtaaccttgtacttcccaggtctgcctcaaactcctggtcttaagtaatctttctagactcccaggtctgggaccgtagacacgtactctcttacctggctttgctttggacagcctataatagttgtaatgactattccttgctctacttagctgcttttgtacaattgtatatacaaagtcaattagaaattaatatatgaagtcagatgtgatggtgtaaggtaggctgatctctgtgagttcaaggccagactggtctgcatagcaaatgccaggccagccaggagtatgagactttttgtcaagagtaggaggagatggtaatggatatatgagagctatccgatcatgtctgccttactgcccttttgaaaatatgtatattgaagattaattttatagaaaacaacttttagaattactagaagttgtttaacaatgtaaaattttagccaggttttcactttctttctctatttaaacatgaagcttttggtaaggcaaagcatgttagtgtgtctatgacaaggaaatgccaagtggtgagaaaggttatcagagcgaggtgaggtagacattcacagggtggggatcatcgtcatgggctgggcagccccacatgggcagagcagtcctgcacaagctgtctggaatgcagtgtcagagaccaggcacttggtgtagagaggtatagtacaggagggcagcctgatgggggagggaggggacagtgtgcagttaagtcagcctgtccttgttggagactggaaggctttagggttataagaaggacagagtttcaaatatgaaaatggaagcactagaataaactatatgttttgaaaaaacatacagatacagatggctgtgtagtgtttaagtacaatgtattgcggaactctgaaagaatgtattttaaatgtttttgctttgaacaagtaataaatgtttgaggagattggtatgtttatctttgttatgcagtgtttacacgtgtgaaaacatcacatgctacttccctaaaatgtatagttcttgggcttttatgcatcagttgataataattttaattaaaaagctcatacatttatatttagaaacacaaatgtacatatttcatgcccctgcttttcttgttttcttaactttaaataaatataattggggtaggtagatactagggcctgggttgcttctaataaaatgcaaaaccaaatagagcccttccagagaatacacagtgtagagctggcagtcttttgaattgaattgcacatgctttgaaaattaaataaagcaaattttgatagctactcatgcactttttctattttttgtagtgtctataaattctttgacttattaaaagaaatcgataccagtaccaaggttgataatgctatgtcaagactattgaagaagtataatgtgttatgtgcactctacagcaaattagaacggtaagataaaagttttattaggcttgcactttcattctttgttttttatttttataccttgatacttcaatttggaaactgtcatgggtaatagaagtattaagcattatcccctagccttatccattttgctattatttcttaaacattctgggtacttgccctaaattaactgtttttaccagccttttatgacatttgcttcttcagattttgagcttgattttcattttgtctagtggagcttgtaattctaaatagtgatctaaattttaacttcttccggcttagaaagaaaccatattgtctataaaagtgtgtgagcagttgccaagttgtgatctgtgctctcagtggtagctgagaagactctacctgcactgttcaactggaaagtcatggctaagcttggcttatattttgtcataatacttttattgatttggggggggggatttcacatcgtgtatcccaagccccactttcctatcctgcccactttaggacttctctccccacaaaagaagacaaagaagaagaaaaaacaagcccaattttgttacccatgtactcaccggtacatggtcaaaatcctggtggatctcatgttaaagaaaactgagtccttccctagccatacctccatcagaagcaatcaattcttttttaaaaaagaagatttatttatatattttatgtatgtgagcacactgtagctatacagatggttgttagccttcacgtggttgttgagaattgaatttaggacttctgctcgctctggtcagccctgctagctcaggtccaaagatttatttattcttatatctaagtacactgtagctgacatcagatgcaccagaagagggcgtcagatctctttatgggtggttgtgagccaccatgtggttgctgggatttgaactctggacctttggaagaaaagtcagtgctctttcctgttgagccatctggccagcccagaagcaatcaattcttgtagaggaattttagttgagcaacatggctactctgacaagagatcacacccaaagatatgatccagctggaatttggtaatacacatctttggtccctctggctggaatgtagacactcatttagaacatacctttgattccagtcaatgatatctaattgatggaccgacaaagtgacaaatcggagaaagacttgaaggaatgagtcagagataggatatgcccagttctcacagtaaagacaggaaggagaggctaaggaacagtcaggaaagagcagggagggagagagaatagtttagttcagtttggagcagttcagttcagtgcagtttagttgagtgcagttgtgctcagttcagctcagacagttcagttagttcgtggaattcagaggcaatctttccaagtagaatgttatcttatttttcatatgactatgaccccaaatatgaaagatttctgttatgatattatttagatgtctgaaaattagaaatgagctctttataactgaattttaaatatttcaaatattataattataatcaaacaattataagctagttttgatgaggaataacagtgtaaagaagtgcttgtaatgttagatatatagatcagagtatactatgattgtgacagtgcaaaagggaaaaatccaagcctctaatgcatcacgtgaaatgactcagaagaagctagaattctagtagaggtttcctatccacgatagacaaagtacgcaaacatttctctgagccagttgttaaaaacctgtggtaggctctagagatggctcagcggttaagatgcttaatgctcttgcagaactcagctcccagcacctacttcaggtgtctcacaaccacctgtaacttcagcttctggtctgtgcaggatacttgcacagacttgtgctaaacaacagacatacacacacatacacagaagtaaaaatgaaatgagtctttaagagcaaaagaaaatgctgcacaaataagttacttaaaaactgactaggtgatttctagatctagaatttgagggctcggaatgacttggggtacagtgcttactgtcttctgctatagtgattttattctacttttgttattaaaatataattacatcatttcaccctattcccttttattcctctgactcctcccacacctcccctcctctcccacactgtgttcctgcttccttttaaatctggcagctcattttctttgttgttgttacatgtatatgcataaacatgtaattataacctgctgagtctgtctagtgtttctcgtgtgtatatgatttaaatgctaaccatttggtatgggataaccaattaataggcttctccccaggagatagattattcttcctgctctctttccttaattgcctgttatttgtctaggggtggggccctgtgagtttcccccatttatatttctgctataataattttaattggatacttccaagtagttttactttcttatatgattctgctttaatatcagcttctgtcttcagggatttgtttgcttgtttgtttattatactttcctctgatatagtgcacttgatatcctgggagttgagagagaggtaaaaaagggtactagaaaatgaaatagtctcatatgtgatttttaggctttacaaaatattctgtttaggtggtttaccctctaatttttctccaaacagagcagtgatcaatagataaatcattaggctgacatttttctctttatattcatattaatctcaagactactaagtcttaagaattttctgtatttgtattttgaagagtaattttaagtagtttggaagggcagagagaagaatgttatagagaattgattaaattacataaaaacagaaaagaatattataactactacatattgaagttcaaaaactttagcagttatatagacaattttgaagtgctctggatctttctgtatgctattccctaagggccaggataagcaacggtgtttacagtccagtctgtgggatacagcaccacagttcccaaagaattttcttctaatacaactagaacatgagagttcacgatgaccgtccacattccagttgaatctttgagatgtacttgatgtagagaactcacagtctgagaaacaaccaattggctcctagagttagttatctctcctgtaatctatagccagcaagcttgtcatggaaggggagcggtcagggttctagagcaggctctgcccctctggtctggcttgagattctctctctattttctgtagtttgcctttgttatcatctctgtgggaagctgggttttacagtcctcgtgaagtgtcacctgaattggggctactcaatagacaaccattagagtgtgttcccaatgagctgttcatagtaaatatgcatagatgccttactgtattatcaagtacaaggtgcccttacaacagagagggtagaggctcatcatccatccttcttgttctctatcaaaaacagtagctattatctatgagagagaaggaagggggttacagtagagcttagaggagaagcagtcactcaggtctgcattctaacctgatcctgagtatatactatgtaatcttggataaatgagttacctaacttgggtacatagttttctaatgtctaaatcaagttaatgagagtacctattagtcagggctctctatagtaacagaactcatagaatggacctgtatctatatctctagatctatatccaaagggaatttattagaatggcttacaggctgcagtccagctaatctaagaatggttaactatgaatggaaagtccaagaatctagtagttatgcactcagtccacaaaactgcatgtctcagctggtcttcagcatatgctgggatcctgaagtaggctctagtggcaatgaaggaatggacttgctagcaaggggaggacaagcaggcaaagaacaaaagctttcctctcccttatatagactcccagcagaaggtgtgacccagactagatttgggttaaaggtgtgttttctcctcctaaagataacggacttttgaattttagttaattccagatgaggtcaaggtgatgatcaagtatagccatcacacacctgttaatgttttaattgagataatatataaatagtgctttcatgatagcttttaatttgtgtgtgtgtgtgtgtgtgtgtatgtgggcaaatgtgggctatagcacagttgtgaagagtagagggcaacttgaaagagttggctctctccttctaccacgtgggtctcagtttcaaacttatattgccaggcccagcagcaagcatctgtacccactcagctatctcacaggcccaaatatttattaggtttttaaagaagaaaataagacattgtctatttggaaaacactgcataatactgtattttcatattgtattccctcttagacagtcacaaaacaccaaggcaatgcacgatatttagaagtttgattgagttaagcattttctaaatgactaatatttacatttgccttagttactctctgttgctgcgataaaatactcctacaggaacaatttaagggagaaagggtttactttgacctacagttccagagggatacagtttgtcacagtgaggaagatgtggcagcagacctggaaagcatggtggcagaacaggaggctcctgaccacatggcatccctcaaaagaaagcagagtgcatgaacaggaagtgggttttggctattaaagccgtaactcccacccccaccccaccggtgactctctttctcaagtgtgatccttgtggggatatttcacattcaaaccacaaaccataatgccatttaacatcagttaagatctcatacaagaagtgtttatggaatatactttaagaaaatgtatgatgtcagctgttttgttgtaatcaaattaacaagctacatcaagaattaactgttaggggctggagagatggctcagcggttaaaagcactgactgctcttccagagttcctgagttcaattcccagcaaccacatggtggctcaaaaccatctgtaatgggatcctatgccctcttctggtgtttctgaagacagcgacagtgtactcacatacatgagataaataaataattcttaaaaaaaaaaaaaaagaattaactgttagtaccctgctatctccatgagctctgagtttgatcaagagatcctgccctcaaagaataagatgaaagaacaatttaatatccctgacatcagtctcaggcctccacatacatgtgtacatgtgcacatgccacaacatgtccacgtgaaaatgcagtaatggctgtgatgctggattgaagagtaccgcgtttaagtagaaatgatgcagtacgtcatggatcttagctaggtgagaaggcggtactgttgatttctactaaggaaaaagagaaggaggaagttctgaatagggattagaaatagaaatgtatccagaaaaatgagtggggacaggaactgggcgtgtcaggcatgtgctgagcatgtgcacaccaaaacagtgactggatgtgctttgagcgctgatgtatggaaggtaggatgggggctgggcaggagcaagctagctgtgccctgcacagtggaaatgctgagtgcttttacactggggaatggcatagtctgatttggccttacaaggctgccctgcactttgtaacttaagatttttattgactagtcttttggaataatttagctttaattaagttggtggctttgaatcaaatcaaggtttccgtttcccattctacttgtacagttttctggagtatgaagattgcaatgccaaagcttgtttattatagggtaaactatagagatatatgtggcttattggttagttacccactgagctaacagtctggtctggtcattggttttgatttaacagtgagtgacagaagccggttcttttatcttagaacatggtgatatgagatggcattttgtagtaagcagatatactttaactttcttttagaaggctaatgactcatgctgcagaagtattttaaaagttttcttttaagctgttattttactgaaattatttttttcttttcaggacgtgtgaacttatatatttgacacaacccagcagtgcgtaagtagcatgtaatttttcactaaaatttgtttttttggactaatctcaaacatattgtttactttggtgataaaaacatactactttataagttaaggtggtaaaatcctgtttggatttgtttatcttctaaaaatgtgtgccttacttatatagcagagagaaccaattggctggaattcagtgttctctgtcacttttctgaggaaaatgcagttcattcattaagtttttattaacgatctatcacagggattttatcaacaaggctctgcatacttttgtataagaacaaatacattctcaatttagggatttggagagaagactggacccaggcgtgaaacccaacatcccacatggtggcttacagctgtttgtatttctagttctgtggggtgggatgcgatgacctcttcaggcccctacagacaccaggcacacaagtcgtgcacaaacacacagataggtaaaatattcctactcattaaaaaacttcatttacaaatcctaaattcctgaacagtatggcagtgttcttctctgtaaatagctcaagtaatcctggagatttcctgccccacgaaagcactggcattgaagagattgattgaaatgcaaattgtgcatatattaattcataaaaatctgttgattctaatgagtggtcattctatggaaaaattatcaaggtaaagtgttaagttgacaaaatctaagccacctaattgtttgggtttttttggttgttcattttaattagaaaaacagagcaaacaagtataaaggtaattagaaacaaatcagtgtaccgtgggctttatatagttttagattagaatcaatattttgataggcacaccaaatgagctaggtgagtttaggtgaaaattgtgcattaaagagggttgcatttcatttgtgtatttatttaactcaagtctataattaaaacaaactaccccaaagtaaagctggaatactttgtcagtgtctgacttttttttttttttttgctttgtatttgtttaccaggttatctactgaaataaattctatgttggtgctaaaaatttcttggatcacttttttactagctaaaggtaagtgaatgtgttattgaatgctgatgtgtcaaatataatgattaaattgttcacttggaatagtacaaaaattattcaattaataaatccttctgtattctctgcatggcttattaactgcattttatagttatgatgatagaacatcattcgaaatgtttaattcctccgttcctcctggtttctgtcttatcccccctttcttccctattttctatgcattctccttttttagtggtgttggggataaaagtcagggcctagtgaattttaaattataaaaatttatttaaattaaaaataaagtaataagaaatggaaataatatgtgtttggtcactttacatggagtttaaaatatttcctaagatagaatctttacttttcttttttagactttgtattttgagaatgctaatacaatgaaaaggaaaaagtagagtagttaaatgccagtacctattccaaattcagggtgaagtcttagggttttttcttctgacttggagaaagtagaaattgctggaaggagagtcagatggaaataagctatgatgattagtcagtaaagacgagattccaggataccgtgctgagggaaaacaacaggatcccatcacggtccccttagagaggagggagttcttctacccaataccagccagacctttccccttagcagctgagagcagctgagatcgggcatgtggagggtggtacagccggagacaagggagagggaagtctgcaacactgcacaccaatctaccttgaaaacagtgatagtaatctaccttgaaaacagtgatagtaatcgctcttggagcatcatcctccctgccttcccactttctgaccactgcattctcttgtcttcatttcatttctgaagactataacatttattcatctgtaattatagttactatatgcctttactgtcagttctgtgtataagtgcattctgtgcccattgtaactactttattacagcgtctctgtttctgagtttttgagtttgatttatttcttagctatctggattgtaccatcaaggatttaacattatcttgtacatttatttacttactctgtgtgtgtgtgtgtgtgtgtgtgtgtgtgtgtgtgtgtgtgtatgcgcgtgcgtgcatcctcaggcttggtggaaagcacttttgcctgctgagccacctctccaacctgtggaattttaaaaactaggccttttcatgtcatcttccaaatgcttgtcatgttaatggcaagtgtccacagcatttatccctgaaagacaacttgactgtgtgtcctgttcttgagtcatttgtcccttaattaggaaatctgaggctcgagtagcgtccctgctgtcatttagttgctgagtacttgatgagttctttctgaaacgtgagatttaagtctgaagtgatgacacagtagataaagccatctttagtgactagttaaagtagctaaagttaaaacttgcaccagagtcctgctttcaatccacatggcagcgcacagtctccagtccagggcatctgttaccctcctttggccttcatgggcgcagacaaacatacaggcaaaaatgctcatatgtagaaataaaagtaaatgaatattaagtttgaggtttaatatctttactaggatatctgttgatttgtatcatactgcattcatttgtcttggaatacttattttaaaacaaacaattctgtttttcatttctgagacatcttaataatgttgtattttaagacattattttattcagtatgtcttctctgaacatgatatcaggttgttttgttcttcatatttttctgtcattttaatgattttaaatcttttttttttttgcaatgctggaaattgaactgaaggttcatgagtgtcaagcaaatattatgccactgagctactccctcaactttgtattacatacaggttctattcatcttgtctttttgtctgttttgagctaaactaattttgttatcctagttctgtcttagttcatctgacaccgtgtttttatataaattgagatcagtgagctcccttgtttgtttgtttgttggtttgtttcaaagcaagtacttggcatgtagctcaggctacctttgagctgatggttttcctgtctgacgtcccaggcactgggacttcactagaatgcaggagcgccggctttgtttgtctctttgcttattagatagtctcttcctattaggttctctgattttgtccccttttgtgattttactttttcttttgagtgtgcttttccccttcatcttactggttttctctgaggtagtttgagaggccctcccttcattcattttgcacttaacatgtagttagtttgtattccctatagaattgcagtgtgaagctgggcagtgatggcgcacggctttaatcccagcactcgggaggcagagacaggcggatttctgagttcaaggccagtcaggtctacagagtgaattccaggacagccagggctacacagagaaaccgtctgaaagaacccaccacccccccaccacccccgcaaaaaaaaaagaattgcagtgtgttataaacaggtattatactaccttgcagaaggtaagggtgagactagagaatttatctggaatgccaggagcctttgcagttctgagtctttgtaggacaaactttatcctcccctcttttcccaggcagcactggttccttttaccttctgtagcaatgacttctccctgcaagtcagaaggtggaaagctgagcattctgctgcatcgttgcaggctggtactgcctctcctggcccctggctaatgtgcgccttcctttcagaaggttgtttaccaggggagaggctgtttctcccggctttgcgcctttgcgattcgtactgggaaacacctgatagcaatctcatccctgtttcttcactagcttaccttttaggtaacatacaaatgagtttatagtgacattttcatatcattgatttttttctttgctgtctacactcctgtaatatttctttactgaattcattgcaaacattcttttgtaccatatcatatggacttaaaacacctacctgatgctgggttattaattttctcacatatttggcagtttcaatattaattgtcattattacaagcttagcaggtacccagaagagagaaagtgaatcagtcaagcttttcctttattttaaaatgtatttatttttatcttctatgtgtatgagtgttttgcttgcatatatgtatctgtattatgccaggtacctgtggagggaggccagagacggcattagatttcctgatataggaataacagacacttggtactaggagcctaacctagttaggctaacctggatcagctgcaagaacagcaagtgctattaaccatgagcaatctctctggcccctacacttctgtctttaaaaaaaaaaagagcaagggaatgagagagagggggagagagagaaagagccacaagaaaatatgcacttatatttttaaataatttatgtttgtatataaatacctatcatgcatttattttataagccttgtagttttgtgtgtgtgtgtgtgtgtgtgtgtgtatatatatatatatatatatatatgtatatatatatatatatatagcataaactgttaggatgttatattctgagtttgttgtttcttgatggttttggctactgtaatattttatagggggttaaactgagcatatgagatattttataagtattttaaataaaagacaagcatgcattgtgcttcagcatggtttctggaaaatgtgagttttgcaagtcataccaagataggaagtaaattttacaaaaaacagtgccagttgattttaataagaattaattattgggggttggagagatggctcagcagttaagaacactgactaggggctggtgagatgtctcagtgggtaagagcacccgactgctcttccgaaggttctgagttcaatttccagcaaccacatggtggctcacaactatctgttattggtatctgatgccctcttctggtgtgtctgaatagagcagtagtgtactcatatacattaaataaataaataaatcactttaaaaaaaagaataatcattataatccttaatcttaaaatccagagggtagattaatactacctaattttgtaacttcatttatgttttaaatctcacttttattttgtttttataaaaaagagaaaagtctttattgtggctgtagcgattagcaaatgaatgagcatatgaatatattactacccacattttttttatctaatttaaaggtaccagtctctaacttttctttaaagtgggactcttgaggccagtgaaatggctttgcatgtaaggcacctgccatcagcctggcaacccgagtttgtcatgggacccacggagtaaaagagcaccggctcctgcaggttgttctctggttaccacatgtgcattgtggtacatgcatacatacatgcatgtgcttacaaacatatgtgcatgcacatacaggtagctaaagaaataatagataaatatagttaaaaaattttaaatgtgcatcttttttattttaggagaagtattacagatggaagatgacctggtaatctcatttcagctaatgttgtgtgtagttgactattttattaagttctcacctcctgcactactcagagagccatacagtaagtattgtaaacaatacagcgctcctctccttttcttcagcagttccgtactgactgtctataggactggtgtggtccttaaactgaaggatgatgaaacattatcaggtgtggactcggcctttgttctcagctctggttttctgtgacagaatccaatgagatgaacttactgaaagaagaggttgttttagctcacagtgtgggaggtcctatgagggctccatgacccagtgtaagggaatgccagtgtggggaggtgggagtgggtgagacggtgggtgagggagcacctcatagaagcaaggggagaggggatgggatagggggtttccggaagggaaaccaggaaaagggataacatttgaaatgtaaataaagaaaatatccaataaaagaaaaaaaagtaactattgctgatctagttagataacattaaacaaatctaagtgtaaataaatcagtttcttggaatagaaatgtttctttttgtcaccacaagaataggactttgaatcacttttatactatagaaatataaactaaactagggacaagccgattcctagctgctggaatgatagaagtgctattagtagatagcagatcaagacatcaagtctaaaggtactgttgaagaggatgaaatggtgaagcctaattcatctctgtgaacagtgacttcctgggaaaacataacctggaaaattttgagaattattcaacatattgtgcttctaggacatgtagctttcctgttctgtctcttgcagccttctgtccctttgtctgcaagggcccttaagccgtaaggactctagagttttgtaggtttgtccatcgggactgggcttcacagccctgcatttttgattggttgtgattttctgtaaaggtctccatctgtgatacagagaagtttccttgataaggagtgaagagtacttatctgtggtataaggacaaatgtttatagattgttactaggaattatactggtctaataaagtgggggttgcaggttctcctccagtatctgtaacatcactagcccttaggtagttggctaggtttcaagtaccaggcatggtttccttattgttgagtgggtcttaagttcaattagagagctgggtaataatggtagatgtgttttagcttttgagtattctccacactgatttctagagtggctagaccatacttaatcacctgtaatcttcttaatagctgagtctactaagtagttggtcagcaacgttcaaaataatacaggttatttaagaaaatcacaatttgtcatattatgtttatcttttatttattttttttaaagatcacactttggaattttatttttattgatattatttgtgtgtgagggggtatgtgtcgtgtggctgagtacaagtagaggtcagaggacaactttttagtcagttctctgtttttctgtttgtgtgagtcacagagatcaaactcagggcatcagacatgggtggcagtggcctttattcatggattcctcttgctatgtacttacattttatattagatctgttttttgtttgtttgtttgtttttaaacatatgtactggtgttttgccagcatgcatgcttgcctggtgcctatgaggccagaagagggcatcctatcccctggaactaaacagataattatggattctggcaattaatcctgggtactccaacagagcagccagtattcctaaccaccgagccatttctccagtcccctacagcacaagtgggaggattatgtctgggcctgtgtgtaaaaattaaaggacagattccaggagtcagttctttactccagtgaatgggttccagggattgaactaggttgtcaaccttgatatcaagtgtctctgccactgagcaatctcagcagcctaggaaatatttttgctcatacatcctgagtaaaatacacttacaagtaacataaataattttttgtcagtctttctctgggtttatgggatgtagctttgggggaatgagattgggagtaaaagaaaaatgtgagttgcaaaaatttgtagcagcgtatacatcacaacagatattcaagggcagtctgtggctcagtgatagagatttgtgtagcgtgcataaagaccctggatttgattgccagcactgcagaacaagagtgtcccaataatcatgaattgataagttaaaattgttatatagtaaaccataataagcagaataaaattctaccaggattatttcagacatcttagttataattacagtgtagcattattttataatttatctaactttaattattttggaaataggacctcatgtggcctaggctggctttgacatcgctgtgtagacagtggtggtactgaattttgattcttcctccacctcccaaatgctgggattacaggtctataccagcactgctggactatgtggtgctggcaatgaacccagggtttcatgcttttctaggcaagttactctaccagctcagttacatccacagcccaatttcattaatggtcaatgtggaatacacaattgtttttattctaatttaccatttttacagaaacagctgcaatccccattaatggttcacctcgaacacccagaagaggtcagaacaggagcgctcggatagcaaaacaactagaaaatgatacgaggattatcgaggttctctgtaaagaacacgagtgtaatatagatgaggtaatttctcttacactttatttaaaacagctgaagtagatatatatgctaagtctgcctgtcaatatatacttcttgtgagcatactttctttttttaagtaggaccacttctattacataggaacaaaattctgggaaaaaaacagtttcatacgttcttactttgcttttaaagagaatagctcccttctgtcctcactggattgtagcatgaagatgatagttttcaaatgcattattcttctagtccattgaatttactagtatccatagtgttttcaaacaccctgccaagaaacctcagtttctcacttccctaaagctaaagtcatctagcattcattttctgtttagtattttatgactctttccaaatacaatatcagctgttaataactgctggggagaacttaaacacatatagtaattattttcttcaagaatctaggcattgaaaggacttttacaggtaatgtacccacgtccctgtagtaatgagcaggcatgtaccagacactggttgctcatcactcgctgaacctttgatagcgtttaggacatgtctcccaggctctgttcatccagtacattctttctctcacagtttacttattgaaattttgtctgtaattcgtcatcagatgtgtgaagtgttgcatctttggaattctgacaactctgggaaggagtaagcccctgtttccagtactgactaaagcagtgctagagccatttccagctgtgctctaccacggtgcttcttgctaatttatgaatttctgtatctgtataggtgtattgcatttacatagtaacccaggtgttcactttccctctttctacggtcacaagttacgcatgcaaataagctgacaaatgtcgtacaagtagctctgtctcaatcctgctgtttagtcataagggaacaaatagtagtaaatacattttctatttccctggctttttgtaattacttaaaattaattttattttgcatattagaataaatacgtttttcaccttaaggaatttattcttagaatttagaatctttacatatttaatattcaagcatagctaataaaaactaatattttaattgatacttgatagcatttgtggatatataactagtggctaattttaataattgattactaaatatcttaggtaagtgtgaacaaattaggaaacaaaaatagtgagtgcttcctagacttaattcctgtgttaattcttatttgttagaaaaaagaagtgggaaaaaaagttagattaagaaaagcaattggttaaaaattctatagcacattgcacttgtagagcaaccagtaatctaaatatgttttataaatgtcattttaaaatgttggtttcaatgtctcctcatgccattaatcccatttcattaacagttttccacttaaactctgttttatgaaatcattattaaaaagtaaacgatcgaatcagttataagttagtatcattactttgaatgcaatgtaagtggcaggtagcactgctaatgtgagggttactaggactagattttattttgttttaaattatatcatcatattactggataattttagatttatatattcaaatgttgtatttttcaggtgaaaaatgtttatttcaaaaattttatcccttttataaattcacttggaattgtatcatctaatggacttccagaggtaatttgaaaaaaaattcagttaaaactagtatggtttgtttgagactttgggggaatggaataattgtttacaattcttaaaatcaatttactatatgtcagttgtttatttctcaaggaaaactaagctgagtagagctgtaaagacagcttttctgtggtgacaaaggttgtaaagatgtacattcagatgtataagttaccatagtttgtcagaagacacagaattagaaagctggacagctggttcttttacctggcttggtaattctatttaggagtttacttaatgcttgttatgtgttcaatgtgtgcaagtgctgtgctaggtcacgtggtacagagatgagccttcattcactgtccttaaaagtgctagtgggagggagggaagagggcagatgtgggatgggggtgtggtgaaggggaaaatgggaagtgggatatcatttgaggtgtaaacgaatggaatggataactaaaaaaaaaagtgctagtgggggaggcagacgtttaagttagaggctagcctatgtgctccctccctcttcccctccctaacaaaacaaaacctccgtgaaatgaagagtttattctttgaaaagataagcaagattgataaaccttgagccaaatggaccagaagaaagacccaaaacttaataaaattaggtgttgaaaaggaaacaaataccaatgaaaaacaggatcattagagcaccattcaaaactaatattcaagccaggcagtggtggcacatgcctttaatcccagcacttgggaggcagaggcaggtggatttctgagttcaaggccagcctggtccacagagtgagttccaggacagccagggccatacagagaaaccctgtctcggaaaaaacaaacaaacaaacaaacaaacaaacaaacacacctaatattcaagtaaaatggaaactctaggaaaaaaagtggataaatttcaggatatacatggcttagaaaagtagagcaagagtatataaacagaactgttagagtgatattgggaaggtaatgagtctcttcactagaaaagctcaggtccaggtggactcactgctgacttcaacaccgttcctcactattccatgacccagcaaaggaaggaatgccaccagaaccgaaacaaaatgacaacccacagcttcttcccaggccatcctagggaaactgcacgcagaagacggaagttagatcctagttctcatcccatgaaggtcaaatagctgtatcaacattctcaatgtaaacagaaactaacactgctacagaaaaccataggcagaatgctttaaagtagatacactatcttctgagaaaaatgaaagattacagttgctcagcaatcgaatgaaactaaaaggcactgcatgaaattgaatgaacaaacagcctatggaatgagaggaattctttggaagctatcaatctttgtatatcatatatatataatgggaatgtaattagtctagtcttgatggaatcaataatgaagttctgaaaaaaactaaaataggactactaaatgacccacctgtatcccttctgggtgtatgttccagagatgttatgacagtataccataaatatccttgtatagccacgcttattgctgctctagctataatagctaatttacaaaatcagtctagatgtctcttcaggaaatggataaagaaaatatgatatttatacacggagttttttaagcctttggagaatgaaggcatttatgctgtttatgggaaaatgcatataccttgagatcataatattaagtaaaataatataaactcagaaatgtgcagattatagcatatcagtgattaattctgagttaccaataatacaacagtgtcacattaaagaaagaaaagtacttcttggagttgtttaaccaagaaagagtccagatttgacttctctacctgacactcattgtgtcttctgtactgtctactgtgcatctgaatccgtgcctgcctaaaggctgtccttgtgtctgtctgtttcaatgtctgtgattgtgtatgtctgttgtttgagctgtgtgtgtttgtgtgagagtggtgtttttccccaacaaagagctttgttctgtttattgaacagcatagaacacatcgcatgggggaagaatgggatacttcaaagaaatctttagaagtttaagcaagggattaattcactggctccaactgattgcagccaacccggataacaaagaccttttttttttttcttttttcttttttaatcaagcagtatccataaagggttgttttgaaatgttgtcacggattttaggaaggttttcttcagctcctgcttttgcagctttcagtaaattaaatgcgtgcattatctaggtcagaggcacggaagtgcatgcaatttaaaattgcagctatgcattaccttaggttgtaaaaattgattaggtgggaaattcaaggcaggtaaggttggtggttggttacattgttgtcttaaaggtaggttaagcaaacagtctgagtacacagtatcttagtcttaatttgtaagtggcctcaaggtatattaataactttggctgtgaggtacagcaaaaattccagtctcttagaatatagtagatagtttaagaatattgcatcaccacagagaaaaacaaataccttatgtttgctctaatctgtggattctagattttacatagatgcagaaaaccctgaagttcattatgacaggagagcagcagaagacttggggaagggaagaaagagtatgggagggtttgtacggccagagtactaatgctcttgaaagacatgatgaaaactatatacaataataacacaccaaacaaaagcagaacaaacaaacagaaaacccagagataacaaagaatctccaagagtctgacggaagtatgtatgggttcttgtttcctgcggaggactttcccatccaaactggggcaggtgaatttcctggaacactgttttaaggtggtgtgatttctgagctgagcatgctctatgcaagatggcttttcaagtgactgaatttggtcacttcaaaggctcagtggtatgttgtagtagaacctcttcaataaactgcaaagtttcttacaagattgatagaagagtggtccactactgacctgggaaagcaagaagggactggtcttttttgtctttcgtttgtttgtttgtttgttttgtccttgttttttgatacagggtctctctatgtagctatggctcactctgtagacctggctggctgtgaactcagagattgccttcttctgccttccaagtgctgggattaaaggcgtgagccggcaccacttgtctgggacctggacttttaatagtcttattcctaccttagtcattagaaacccgctgttctcaactctacagagtatcctaaataaagggttggtttcaatgggtaccttaagagaaacttgacattttcagtattgcacatataattnnnnnnnnnnnnnnnnnnnnnnnnnnnnnnnnnnnnnnnnnnnnnnnnnnnnnnnnnnnnnnnnnnnnnnnnnnnnnnnnnnnnnnnnnnnnnnnnnnnnnnnnnnnnnnnnnnnnnnnnnnnnnnnnnnnnnnnnnnnnntttgcattcttctacctttttttctttataatgcagtttttgttacctcaagattaagcattttttaaaaagatttatttatttattatatgtaagtacactgtagttgacttcagacacaccagaagagggcatcagatcccattacagatggttgtgagccaccatgtggttgctgggatttgaactcaggaccttcagcagagcaatcagtgcccttaaccactgagccatctctctagcccaagattaagcattgaatttgaaagtcccagaaagggcaagggaatgtgggtcagtggtagagtacatgtcaaatatcctgggttctgtccccagcactggaacaacaacaaaccaaactaggcagggaacactaaagggctcaagtagtagtggaatgtgtgtttagtatgtacaggactcttggtttttccctaccactagaaggaagggggagaaaaatcacagcaaatcatggttatagtaagagcccttaatgatttgttattttttttttaacactgatatgaccacaagtgaaaggttctactcagaacacaaaagtattttagaaggttgtctaaaattaccttcatactctgcatacaataatatgtctttctgacataattttattttgtacttagatgttgtcattcagacatctcatttttatatgccagtattacaaaattttaaaaaatttaaaatattaaatgcttttggttctaaacatgttgggtaggaaatggtcaacctgtgatgactttttttgtgttcagcactattttgtgccattgatgaccctcatctagctaaaattctaataagtgaaatgtatatgtaaaatagtaaaaaaataaataaataaagtttatgtgtaatgttctgttctagaccgatcttactttgaatctggactcagtatgttttaaaattaaatgtacatagtataaaagttccttaatgaagtctacttatgtattctaaaagacataacacaaaaaggaataactgccaatttctttcttttgaggttgaaagtctttctaaacgctatgaagaagtttatcttaaaaacaaagatttagatgcaagactgtttttggatcatgataaaacacttcagactgatcctatagacaggtattgcaatgacataatgtttatatattggtatgctttttatttggattaataattactcagatatgttatgtagattttcactaacttataaatcttttaacatcttttgtagcaggttattttcaaaagtctttgtctagtgcaaaggtagttctttaaacatacaattaataacaaacagagatttagtgtaaagtatttcttaagccaattttctgattttgtgtttgtttgtttgtttggtcatctagataagttttaaatgtgtaccaaaagaaaatggttgaattaattagtttactcaagagtttcctctttcattccattcttttttatatgctgttgcttaattgatatttcaaacaattttaagaaaatatcctcttgacttaccatgtagagatttctaaaataggaaatggctgagagtaattacagtttttaactgttcacatataaagctaatttgactctttaagaagaattactttactatgaaattaaaacatataatttagaagttaaacacagtaaaatgtttctagctctatctaagtagaaatgaaatctttggacagcatagcgcactggaaaatgggttctgcattgttttaagatctcacgaagcttagccatgaacaccaccagccagaaatcagcttccactttccagaaagctgtgccctgtggttggtgcacgattttctgtaaaccatgaaggagagccatgctgaagaacggtggtgacaaaaaaatcatacaggcagcacttatttcatagtacttaccatatagtgaacattcgtgtgatgctctcaacaacaggaattaattattgttattgattattaagtaataactgctttttggtgcataaacacaaattgtaaatttcagtatgagttactttacgtatcatttagttttgaaacagagagaacgccacgaaaaaacaaccctgatgaagaggcaaacgtggttactccacacactccagttaggtatgccttttcctgggtccagttttcataattgttcattcagactgtgttagtgtttcagacttgctctttgttggactttgtatttgcacagcatgtaacaaatgtgtatggaggactgttttgtcgatttatgacttgcttatgttacatatataacttggttgtttttatgtataagaaacataactttaaaagtatgtctcactcagaaaggagaagcatcagtgtttaatgttgcatagcctaggttacttcatgtcccttcttcactgctatcccactttggttctaatggtcagatccagctgagggctccacatgctttcccccgtttctgtccaccctcacctttgtgcaggtcagctctctccttcttgaatttgtttagtatctaactgatcgtgtcattcatttcttaccactgtagctttctcctaccaataaatctgttttccacagagcctggaaataatagtctgtgaatgtaaattaaattgtgtgtgactgctgcttaaaccctttgattgcttctacttgcatttagaatacaaagcgtattccttaacaatccctaagaccttacatgacctgttttccgttgcctagccaacctcgttttgttcttgattactctgtgttggccacacactggtctttttccagtttttgaattgtcaaagctcttttgtacttgagagccttcatacttggcatttttttcttgaaattcttctttctgtggactgccatctgctcttcctttatgttcacgatataactgtaaatccatttacatatttacgtgtttttcactaataccaacaatagcctttaagttgctttccatatggaccatgggtttttattcacagttttagtaattaagacctgtcatggtgcttggtaccttgcaagcaagcagtgagacctatcagctacagtaggtatgtgaacaggctcgttttagtaacacaaagtgtatggaatttgtctcaagtgaattttaccaagaggtaatattatataaagaggcactgaaatgtggcacagcataatggatctggggactactagctgctctgtactaattgtaagatggggcataaactgcaggaatggaaagcaggtattgactagtatgccatcctcactttacctagtgcaatggtgtggtctgtgttttaaatggatgataaacacaaggaaagataaacatagatttgatttctcagagaagtttttgtttgtttgttttcctggtgatcaaattcaaggctttgcacatgctaagcaggtgctctatcattgagctacaccccagcccagactttagttttacagctttacctatcagtggctcatggaggaaaagtgaagacagacaggttagaaataggactgtcagtgcaacttagtgcttagaccacagtgcgcaggagaataacctgaggattcttttcctgtccatgcctcgtgagtgggaatctctacactgaccttttggagtagttcagctgagacatgccaaaggactggaccaagtgaatagtggtaggaatgaaggaccagggacaggtgtgacaaatgtgatgctttcatgtttcacagagcaatattaacaggatgtgtgcagattctagtaagcagagggacacagagcacccacagattggggattacccgttagaaacgtgagaacacatggatctgcccaaagccagcaggcatgaaagcaagaagggaaggcttgacccgtgaggaatgcagtcagaagaaccagataatacaggttaggctacaattagctgataaggcttggagcctagagcggaaagccaagaatctgagggaaggtaccagtgtcaagaaaaaataagtgctttgagtcagttgcttcaaagaagtctgcagttttgtttttagtacttggtcatttgtggcattagtcattgtgacttaaattaatctctagtaactataaaaatgtagtatgtgaaatatgaagtatagagaaacctgcgaatatggcatgttttgtattatatttaatcagcctttcatctctaaatggtttgtggttctttgcagtccatacgatgtctcaaaagcaaagctacaacaccaatctttactatgttctataaacacaagtgtatgtctgcatgcaaagttatagaactgtggaggtcctgagaaactggcaaattttatgctttagcaatagtgacttttaaaactatcactctcttcagacaccccagaagagggcatcggacctcattatagatggttgtgagccaccatgtggtcactgggaactgaactcaggacttctggaagagcagccagtgctcttaactgctgagccatctctccagccccagcaatagtgacttttatggttactcaagaccttactctcctcccttgaaggagtaatgaaggctcttttaattcttcacatgagtttctaagtatcttactgtctttatttcaaagtgtataaaatttaaggacagacatagtgatcctttgtttaatctccagatttgggaggctggatcaagagggttgttgcaagcttgaggctagcctatactacacagtgaagtcttggagagtggggtattaacatttcattgtaatagtttcttgaaagaacagtattttgatgccagttatgtatccatataatatgaaaatataaggtatattttctggaaaacatcattagtttgacaggtaattctctattgatactaatggtacttagttttattagtaagtgtatcagttctgcaattatacttaatgatactacttttctaaaagacttaagtaatctgtaatttttaaactatacatggtaagtggattttattttatttagaacttattcaagatacatggaatacatggtatgttaagagatatgcttaataggatgcctttactagtgtttccatttttcataattgttttggctatcctgagtcttttggatcaccacatgaattttaagattatcattctaacttctgcaaagaagtgcattggggttttgatgaggattccattggatctagagatggcttttgggaggatagttttattcataagcccatgctctcacttcacctaacttgacaaaggccaaaatataccctgaagaacagacagcatcttcaacaaacactactggtcacacgtagaaaatgaaagtagttccatatcttgtaccttgcacaaaattctggggtgagttcctcctgcctttacttccttcagtgcactgtgacttaggatgtgtaatgcaaattacacccaccccccaaaaagggatatgctcaacttatgtgatagctgtgtttcattcttcctcgttttctttcttagtggcttaatgcttcttcctcggttttcttctctaggactgttatgaatactattcaacaattaatggtgattttaaattctgcaagtgatcagccatcagaaaatctgatttcctacttcaatgtaagccatatgtaaaatatcacttgtgatatcttataagaaaattgaagttagaagctaaagtactaagtatattttaaaacacttttttttaatccaaaatgtacttaatttggtattttatttgttgctctttgaactgctccaaatttgatggttattttatttaaatattgttaagtttttcttatgtttgctactttccttgcaactgaggcacttccctctaagacactctctttttcccctccctccctcccctcccctcccctcnnnnnnnnnnnnnnnnnnnntccttccttccttccttccttccttccttcctctccttccttccttccttccttccttccttccttccttcctctctctctttctctctctctttttgaagcagaatctcaccatgtagccctggctggcctagaactggatgtgtagatcagtctcgccttgaactcatagagatctccctgcctctgcttccccagtgctgagattaaaactatgcatcacctcttttttcactcccttttccttttttcccattcctttgtcttccttcacattgtacatggatctatctgcatatatgtgtgtttgtgaagtctagggttcaccatctggtgtctgtcttctgtagttcttgacttcatttctaaagacagatctctcactgaacttgagctcaccgagtcctataccagccgtcagtgagcccccaggattgggtcctctggcttctgcatcccactccgagatggcagatgcatgctgccacatcaggttgtcacatcaggctgagatcaagcttaggattgcacggttgcatagcaagtagttcacccgctgagccatgtccccagcccatcttttctctctttctgttttctactactgctcaatatatatgctttttcttactaaatttaaggtagaatacaaagtaatgagactcatgtcatattcagacatatagctcactatatattataatttatctattcctcagttctctgaaatactatcttcctatttttaagatcccattgctgctaagtattctgtgagtctaactattgtttgttttagtttctattagctaataggacttacctttcatatagcccttcccaatcctaggagaccctaaatttaatatttgaaagctcatgttgtctttccctcagaaacacaagacagaaagagtggtaactggtgactggcatctacaagtggtcccctcatttcgtctcttgcttaagggttaagtgacagggaaatctatagtcatgccacacctggctgggagcctttacaaatgaattaatataattaagtgccttttatacttgctaatgttctgtctcatactggaacaagtttttagcatagtatgttgttctcttctactgtataatccagagattagcagaacaagttctgtcatccgtaataattgttcaaatatgattttatttgcccaacttctataaagtaataatttgccatatatctacccaattgcttacagcttttagcaaggataatgtagatactaaagaaaaataatctctcatccaatattttcttgagtacttgctcccagctttgaagtaggtaggagctcccttttatttgagttactttagttaaacaagaaattcggtttcagggacattttcttaaggagaatttatagcttagctttttaatgaatttgaagcttcatgcactgtcagaagataattgatgtgtagatgacagatgggctcaggcaaacattgtggagaacataatagattttgtgtgtgtgtgtgtgtgtgtgtgtgtgtgtgtgtgtgtgtgtggtttttttattttcctcatcttcctcctttttctctttggtttggtttttccctctttcttctctcccttccttcctccttttcttcatccatccatacattcatacatacttatatccacccattttgtcctcaaactcattatttagcctctgctgacttagaactcaaaatcttcttgcctctaccatagctggaaattttacttctttctatattcagttgtcttcatttttctcttttttggaaaaaaataattccatctttcctatacataaagtcttagaaattatgcaaacattttgacataagtaatattacactgggaaatggtgtctttgtgtgtgtgtgtgtgtgtgtaagtgtaatgttcctaagatttgtttgctattttctttagggaatacagagttattgacatcttatgtgcgttacatttttagtgtcactgtgcaaaaagaattataatcttaaatttagaaagtttatttttagtgtattttgaatgtatatgatatatcaagattataaaaaataaaattagtctgattataggagacaagaatgtttgtaacacattttagtatagcatagtataagttatagactattataatatgtcacttgtaactattctcctgacttgcgtacctgaaaatacaaataaatggttttcctaattctgcattctcttaaagcacatttcactaggaaaagaaacaaaactcaaatcttgcttttacttcttcatttgcttttgagtagtaaggttgtatacatttttaaaaagtatttttttaaaactttttaaaaagtttggggttttttgttagtttgtttttatgtatgtggttgtttttgcctgcatgtatgttaatgtgctatgtgcatgcagtacctgcagaggccagaagagggcattggaacccctgggactcgagttacagagggttgtaagcctccatgtcaatgctgggaaccaaatccatgtcctcggaaagccagtactctaaccgcccagcatctttccaggccactaaagcaattcataactgaggatactttatgagaacatatgatagatggaaaggctgagagatatgttttgtctataacctttatttgtttaaaacagctcttcttaatctgtaggttgcaatcccattgggggttgcatatcagatatcctgtatatcagatatttacattatggttcataacagttgggaaattagttatgaagtagcaacaacattttatggctgggcagacaccacaacatgaggatctgtattaaagggttacagcattagcaatgttaaaaaccactggcttaaaatttcaataacagccgggcagtggtagcgcatgcctttaatcccagcacttggtaggcagaggcaggaggatttctgagtttgaggacagcctggtctacagagtgagtgccaggacaaccagggctacacagagaaaccctgtctcgaaaaaccaagaaaaaaaattcaataacagtgtactgaataatttttgtgtctgacaagcagtgggattgcatgttgactggtcatattctgtagtgtcagttgctttgttatagtaaaagtgtttacacggtaacttcaatagttatttatgtttatatttcttaaagaattgcacagtgaatccaaaagaaaatatcctaaagagagtaaaggatgttgggcacatctttaaagagaagtttgctaacgctgtgggccagggctgtgttgacatcggagtacaggtaactcgaggcacttctgttggtccttagtgtagaacgcatcagctgctgccgcctgtgctgcggtggtgctgtgtggtgggatacggtagtgggatacggtagtgggatacggtagtgggatacggtagtgggatacggtggtgggatacggtggtgggatacggtggtgggatacggtggtgggatacggtggtgggatacggtggtgggatacggtagtgggatacagtagtggcagatggtgcggtgcgtttgctgctgcttacgggacactttaggaaggttgaggaccactgggttaagtgattatgcacagaattcttctgagtcttgttttagaataaaggaatagtcttgtgtgtgaatgtctataattcaaacaccaatttttcttttctttaattttagttgatgagaactaatcatttgtttaaaacatttactgatttaatcaacttcggttttttgtttttctttttctctttttggcctgtgctagtatcattgagttttacagacagaaactattcttttaatattagctatttcaaaaatcaatattctgcatcaccaaaaggattatactagatgtgtaaaatgtttaaaattgtactgggcacatcgtctctagggagcaagtgacaaaagctagatgtgagcggagaagcatcagctcccagacatactaagctggctactgggagtgctcagcacaagtgtatagtgagccttagactgtaaacaaacgagcctttgtgatctcttgctagccacattcctagaaggagcagaatgtgtttcaataaaagactttaacaaaattcaattaactttttgactttctgaaacagtaaaagcttattatttttccttttgtttgtagcgatataaacttggagtccgattgtattaccgtgtgatggaatccatgcttaaatcagtaagttaaaggaaacaaaatagcaaaaaaatttaatgctgacacaaagaaagtttcaattaaaagtttttttttcaattatctgttttaggaagaagaacgtttgtccattcagaattttaggtaaatattttctcgttttaataaaacaatttctttctataaaagccctatttaaaattattcactctttctccttttagcaaactcctaaatgacaacatctttcatatgtctttactggcctgtgctcttgaagttgtaatggctacgtatagcagtaagttaaattttaataaataagcactgtagcttaatttaaacaaattaagttgtgttgtggtttagtgttgctttgttttttgtgtgtaactgtggtgagaaggaaaagtcatactgtagatcaatatatgctgaacaatgtaattggcagttacagctatttaaatggtttaacatgtcagtcagtcaggtcatctgggggatagaattttatgaggcttctgctctgagtgtattgagttcaggagaggcagctaatgaaacggctacaaaggcttgtgagccacagagtgttgaaggacagcagtgcttctgtgccccgctgttaggcctctgtgctcatgagaccaggagcaggaggctatcagaaactgaatacttcctaattggttgctgtttttataatacctatgacaatttaatgatcatagaaaataacaataaaggctcataactgtttttaaaaatataatttgaaaaatgtattacttttcttttttaatatattacttttcaaacattgttgcaaatattaaaatgttgcacttgcagaaacaaaagaggaagagttatctaaagatagataaatagataaaggaatttaaattagtaatcactgaaactgaatcttcataactgcaatctgcgcatttttaagagaaatcattttctaataaagctagcaaattctcttccatttccctttgaagtgttgagaactgaactcaggacagggactaggcaacccagccccctcatatttactggttctaagaaaggatctcaggaggcattgaactcagtctgtagactgactaggtcttgaacttgtaattctcctgccttagcctcttgagtatctggtattataggcctgcagcatcgggctcaaagaagggcctcgctgtgtagccctggctgtcctagaactcaatatatctgtagaccaggctggcctcaaactcagagatccacctgcctctgctgggattaaaggcaagcactgctactgccaggctaattagcagaatcttaaaagcatcactagtcatcctttaaaaacaaatccttttatgttcatgagtaaactgtaaactgcagttgtcctcagacacaccagaagagggcatcagattccagtacagatggctgtgagccaacatgtggatgctggggattgaactcaggacctctggaagagcagtcagtgctcttaaccgctgagtcatttcatcctaaccaagcagtaatgttagttaaagtggatattataatgaattgctggtaagatacctgcctgggtgttagtgtagggcatgtaaacttgtgcaaatcttatagaaactatgattcctatctctaaggaaaatgtgtgcacatacacttaaaaagttggaaaccagtttcttgagagtctgtagaccacagaataagaaatacctgctgtaaataaaaagtgcttacccttttttttctatatgttggtttgtgtgataagatcttccgaatctcatcatttcagacaatactatttcatattgacacatttttcctcttgtttttaggaagtacattgcagcatcttgattctggaacagatttgtccttcccgtggattctgaacgtacttaatttaaaagcctttgatttttacaaagtgattgaaagttttatcaaagtggaagccaacttgacaagagaaatgataaaacatttagaaagatgtgagcatcgaatcatggaatcccttgcatggctttcagtaagtgattagctaaataaccgaaggtattcatgcgtaagtgacctgttagcgagcagttgtttatttaatgaatcacctgtgttcagcgcaggactcaagtggaatattggaatggcctgagtgtgggtgggtgtgagttcctgagtgtgagtgcaggtctgtgagctgctgcttgttctgctgtgaacaggccagctggcctgctgagcaacttttcatcaaagtcggcgctttaaagtcggagtcttgagtgttgaggtagtttatttaaaatccaagtgttattgttcataatataaatgtttacacttcgctgggcgtggtggtgcacgcctttaacccaagcactcaggaggcagaggcaggaggattttggagttcgaggccggcctggtctacaaagtgagttccaggacagccagggctacacagagaaaccctgtctcgaaaaaacctaaataaataaataaataaatgcttacacttttcaacaaaattaaaagattatatacatttttctgttttatctgtttgatcattttgttttagtcataaagataataatctgaagtccacagtattatttaatggtagatactgttttttatatcattataggagtggaaatctttatgtgccatgggcagttagttatagagcatgcaagctacttttatcttaataaaggcaataaatcctatatattcccctaaagtgctgttatattcttcaagtctactttactaggtaagaccttgtggtttaccagattttcagattttaaaataataattcaaaccatgttgcataataagaatatttattttgaacattgatatgaaatgaaagaaatttcaagttttggaggatcttcggtttggaattttttgattaggaatactcagccagtgaaagtctatgaaaatatttttattttttatatgttgttaatgtctgattttcaaattataaaatcatgagattgatagtagataactttaagctgagtcatgatattgtgtattttcctgtaagaatgattgctattatattggaaaatgcatcacatggatatacttaagctttaacagaccttaaaaagctgagatttgggctggagagatggctcagcggttcagagtacttccagaggtcctgagttcaattcccagcactcacatggtgactcacagccatctgtaatgggacaaagacagaaacggtgtgtccacatacataaaataaacaaatccatctttttaaaactgaagttttggtgcctgagaaattaagagcactggtccagaattttttagttcaattctcagcaaccacatgatggctcacagtatctgtaatgaaatctcgtgccctcttctggggtacaggtataggggggggatgaggaggggggaggggaagggcgagggaggaaaacatatagagggtccgtatctccaacccaaatttcagttttttaaggtctgtgaaagctcacgtatatccatgtgatatattttctaattttccaataaaatggcaatcattcttacaggaaaaatatacaatatcatgtttatatgacatgacttatctcagttatccactattaatttcataattctataatttaatttcaggtgacaattagatgagtttttcattaactgagtacaactatgtaatgaatactcaggtcaagacctacagcaacttttgattctgtatcattcatatacatacatatatatatatatatatgcatgtacatatatatatatatatatatatatacacacacatgtgtatatgtgtatatatatgtgtgtgtgtaggtgtagtgctaaaacctgatgagaatgtactcacattatattgttgatggtaggtgggatcaaatgaagtactaattattttcatctctcccctaaaatatatgtgcatgtgttcatgtactggggattgaacccagaccagatagtgtcttccttggtcagctccatcctgtgcttgcagcttccctcacatggtgtcccatggatcctctggtctccatggcaacttaggcttagctttcatatcttcatatattattagcctatcagagcctccttgcaactgaagaccaagtgttcaaaacatgagaatatggaagacattttaagtcaaagcagatatgttatgactccaaaatatttaaggagttgtccatttttaatatggattctaaaaaaagatttatttatttttcctttatccatattaatgtttctttgcatgcatgcatgcatatttatataccacatgcatgcctattagatcccccaaaactggactcatagatggttctgagccaccatgtgggtgctagggataaaaatcagatcatcagcaagagcaacacatactcctgactgctgagcccaagagttttcagtttaattcctacagtcacgttggtttctgccagagcatgaatgggttttctctgcctttgactcactgtgtttcaatatttcgctttgcttcttgtcagaacatttatctgtggccatacttcctttacaggctcactatgtttaatgcctacaatgtctaaagtcatttattgactttgtatcttattagatgacttattagatataaaccacttaagacagtgtatggggcctggtgatagcagatgcagcagttaattatagaaggattagtaagggacagaggtggtcactttacaatgatatccaggtttctggcttgtgtaactcagtggtagtgtcatttaagaaaatagatagtctgggttgtatgtaattttctttaggataaactgcaatttattatattgagtttaaaacaattttaggccattcaaattgaggtcaattgtatgtatgagttgagattaggaaagaatctcaggctaggaatatgaatgtgaaagctaccagacatatataataaacattaccaatctttactgccaaattatcttatgctggccagtttggtaagtactttctgaatgttactacatttttaaaaattgatcactacattctgatagtagtctaccaagtggtaatattctagatgaggaaatgaatacctagagaagcttgttatatttccccagaccatacaagctaagtggcagaggttccgtttgaatcctgatgtgctttgtccaaggctgagtacctatttagaaaataggtaatatcaattaaggagataatgtaatttggggaaagaaggctacagatagaaggccagggagctctaagatcaaaaggatacacaggaaagaaaatattccaactacaaaagaaagtgaaattgaacactgagagaggagttaaaagcatgagtgggagagtgtatggtctcaaggagtgcatgcctacttcagacacggtagaagcatccagaaggattgagaactctagcagcaaggaagtccatagtaagaatagagaggactagtaaatggagtagtcacagtgagctaagagtacagagagcagaagtggcacaccactatggcaatgccaacccaggaaagactgtcttttaaaactgaagagagagaccagggtgtggtggtgcatgcctttaatcccagcacttgggaggcagaggtaggcaaatttctgagttcaaggccaacctggtctacagagtgagttccaggacagccagggctaacttgaaaaacaaaacaaaccaaacaaacaaacaagaaacctgaagagagaggatgtaatgttatgggaaaaaaaccaactacaacaacaactacagtgttttctattgctaggaagtggtagtgcaaatggttgttttatgttgctcatgattttgtgaaaagacaggctttgggaatagcttacagggtacttgctgtctgaccctgtggtacagcagtctgggccagtagctctgccgctgagatcccttcactgctgggcttaggtgttactgaccctctcacacgtgattcttcctggctctgcatcccaccccattagcctctggtctaatacgagtgctgtgtttcctcagagcatctggttttagagtaggcacactttgacatagaagctggccgccaaaaggcttctaagaggaccacatctggaaattgcatgctggtcaaaacagtcacagtgcttgccaacttgaggggatggggaaacagatgccacctcctgtttaaagagaatcaaggtcacatttcagaagagcatgtgggttgcaaaatactgttgtggcaaatgggaaaagtgggaaacactgcaagtaagtctgccctggcaggaaattgaggaggtctccaattaatagcttttcttttttatttatttatttgataaaaatggctggggtggagaggctgaagtggcactgaaagtttgagggtgcttacgattggcaggtgttactatgggacttgatagagagagtggagtggactggcgaaggacaaaagaattgccctgcacaattccaggccattttgagggcaaaaacgaattctctgcagttgtaccactgctctgtatgatggcattctttcctcagaatcatcttgcaagattagaaaaggtagttattaggtgcagtcaggccttggagtacagctatggaggtgcagtagagcaacagtgcagccagggattggagggtgtttgccagtgagtttagggtcaagactggaagttgtacctgcatggagcctaatgaagtatagatttatatcagcagaaatgtttggtgacatttgaagtgacgacgtgattgacagaaaaatgaaaagtttcagtgtaatattaagaaacaggcatttttatattcacacaaatgatctcaggagagagcagactgaataggaatggagatgaagactctgcaaagaagagattcaggaactaagagactgagagggtcagagccacccaggcaggacgtgtgtagcaaggagcaatgtgaacaaggaactaagatttctgtgcagaggggcctaggtgggcagaggctaaaggcctggaaaaattaaacttgtaatgttctttgtctgagttgctaatctctatgaaaaatgctctgtctggtgatacattgtgcaacagctgtctcacgtaggaaacgtgtttcagctttcttccgttaatagcgatatggctctctctccctttatttagtttgtaacttatctgtgtcattttcttcaagtgaatgcgtatcgccctaaggcagtgcatcattggatcttgatctgggtttttattgtcatcagttggataataatctttctttgagacatttgaaatatttcatttctctgtctctcatcttcctctttcctttttgtcccttcccccactcctctattctctctgatttttgtttgttgtgtgtttgtttttttttggttcttttgaggcagagtctcctgtaacctgtttgtgctgcagtcattgttcagaacagtctttctgccttgtatcccagcttctgggattataagcatgccaccatgctcagcttctagaagttttacatcagtgtgattagtgatatggctggaattcaattctcctggtgctgtcttcttagctgtctctttgttcattttcctccttttggccttcttctgcattgaatattttaatccattttatcttctctgtaggcttactacttagactccttcgttttattttttaattagtggtattaatttaagatttataacatgtgaccttaatatctcagtctacctttgaatattattttacaactttctgtgtagtgtaaggatctagcagccaggtatacaggacacagtaccttactctggaggcaaagcaggaaaattacttccatctaggagttcaaggccagcctgggcagcagagtaaaactttgtcttaaaaacaaaataaataacgaattaactaacataaaaataaacaaacaaacaaaaggaagggtggtggataagaatgggaaagagaaacatttgagcagaatacttaccatttgtctcccagctttggggctgttactgtaatacatattatctcaccagaagttataaaagcagtgcactggtgtaagctctgctgtagcgcatccgttctcttccctccatccgccttccttcctttaagccctggatggcctacaactctataagccaggctgacctcaatttcacagcgatccacctgcctttgcctccagagtgttgggattaaaaaagcatgaaggaccatgctaagcccattgcttgtcttttagagaaagagagagaataagatataaataaaaaataaaaaatgtgagccgggtgtggtagctcacgcctttaatcccagcactcgggaggcagaggcaggtggatttctgagttggaggccaacctggtctacaaagtgagttccaggacagccagggctacacagagaaaccctgtctgggggggggggggggagtatttttatttatttacatgtttttctttctggtgttctttatttttcatagagatttagattttcatctgatttattttccttctttctccaagaactttttattcattcatttaaatttttttgggttcacatctatctgtaaggactatttcaacttttgtgtggctggaaaaacaggtcacttcatgcttggaagctatttgactaagcaaagaaatctaggttacagctttcttttcctgtttaaacaagctgctgtactgtctgggtttgcctcccttctgaagtcactgtggtgtttctctgctggggaagatttcctctttctggctccctgtaagattttccccctattgttggttctcatccgttttcccatagcatgcctttatcttgtctctgctttgggtgtgtggaagtgtaggatgtatcgctcttggacagccaggcccttaagcacaggttagggtgttcgtattgacctctctgccttctcttttgaggtccctcttttatgtgtatgttaagttgcttgtggctgttgccacacccctcctcctcttttaaaggatgcttgtgtgaggtagttcattttagaggtttctatagctgtaccttcaagcttattggtatttttcttctgaagtatttaatctgctcttaattttatgtgcatactagacactatatttttaactctagaaatttttatttagattccttttatatccctttaacagatttatgctcctttgccttcttggacacatggaacataggtgtttataactttttaatcatctaactgcttactctaatgtctattctttttagatgtgttcctattgactgattctctcctttctaacagccacttggtttttttgcctcttggtgatttgttttttgttttgtttttcgagacggggtttctctgtgtagccctggctgtcctggaactcactctgtagaccaggctggcctcaaactcagagatccatctgcctctgcctcccaagtgctaggattaaaggcgtgcaccaccactgcctggcagtgatattttactagacgttaaatattgtgaattttgccttactggttcctggatattttcatattcttaataatattcttgagttgtgctttgggacacatttaaattgtaagtagcttaattgttttgtactccctcccctccctccagctttttctttttctttttctcttcttttttctttttttgtttgtttctttctgattccagaaactttttctaatttcccccactatccaagaggtgatcttgtaagtactttacctgctgctgcctgtagatggatcataagctcgtctactgtggcaggtaggaagcagtttggactccagcagtgcctctgctcccccagggcttcttcgtctttagtcctggggagttatctcatgggtgtggactgctgtgccccagctgaagtgggtctccacagacctgctcagctctgttgtgtgaatcctgtcccctcagtgctgttgacttgtgtttgttgggagccagtgggtttccattcccatcattgtctgtcggtgtttcggctaggatactttccctgcagtgggctgcagcatgctgtctcatgggactctcgtgggcctttgtcctgctgctcaccatttgagaactgtttttttgttttgttttgttttgttttgttttgttttgatttgatttatttatttatttatttatttatttatttatttatttcagttttgtagttgtttaaaaccacaaaatctggttcttgttctccagcagggctgtcagtttctaagtgaaaggcttcatgattggtgagatccatataactatgatgtcgaagtccctgaggactgtttaggacagtgtttctgtgggggctgttctggagtacagctgactctgtggagacaccgaagtgctagtagttcattatttcctcttaatactatctagaaaaccacaagaaagttgtgtctgtaaatactgacagacgtggctgactcagtcaccaaacacaagggagtttgcttatgcagctaatttgattactatgttcttatacattagttttgatcactatactcttacatataaaggttaaacatttttcttgtcagttctttccccagatattacatgaagcacagtattatacaccagtactatggtagtaagtgactcagcctgtttgagtcctgatttggtagcaaactcacaaacagatttttgagatgttttggtatcttttgaaaagtcagtgttgacaggaagtgaacacaaaagggagaaaagcctgtggctctgtaaaagccaaggaaggagccaaagaaagaacctgtattgtctggttccgtggtgaatcattaacctctggtgcactgggcacaaaggttgcgtgcctgcctgtgctattggctgtgaaacaatacgctggcttttttttttttttttctttttaagttacagtttacaaagaattgtgccttacaggaaaacaattgaattgtgagataatgattacttgacttagtaacttttaaaactgtgggttaggacaatgacacagcgcaggccatgttgacagttacacaagaaccaggggactggaatgtgatttttttctaccatgtgatttttttttcttaaaatcaattctttctgaaaacatatcttaccatgatccattttctctttaatatcacacctctattttccacaattcactgttatggtcttgggtaacttgggagacttgacttcacagtcaaagtgaaaaatattttattttgttcagaatacattgttgatactggctgaaatagggctcagggatattctaggttgtgtgtctctgacaaaaagaattacttcatagtttctaaattatttaagaaaagccctttttttttcccaagacaataccgggccctcattttcctcttcttctttacttcctttctccttctttctgcatatcagccatttggaaagaactgcagttgcccaagtgaaagaaacaaaacatgagaaatagccccaagcctccaaggaacttgtgatctagtagagaagtgaattacagtgctgtgctgagctatggcaaaaaaaaaaaggaaaaaaggaaggaggaaagagggagggaaggaaggaagatgacagaccagtaagagtcaaactagtgagcacacatggatgagagactgcttacaacagatttgggaatgtgcagcgatcgaggatatgaaggtggccctaacagttacctaaaacccagcattcaaaagctgcagcagcagtttgttttctgagttctaggcaggcctaggtcacagaaggagaccctatattcacaaactaatgcacaaagcaacccctctgcaaattactcctgatgaagatgaaaagccagccatgagtaaaaaggaggtattttatacaagggaagacagcagacaattttctgcagtagctttgtgtgctagtggggtgggagggttcttggaacagtctgtgcctccttctctcacaaagcctgctttagtacttttgctctcacgctgacgatgccattgcagacatgattatgttagtgcactggaggactcattcactaaagattgctacaggcttttgtgtttgcttttttagttgtattagattatatgtgtgagtgttttgcttatgtgtgtatatatataccacttgtgtgcctcatgcctgtagagatcaaaagaaaacatcaagtcctctggaactggaggttcataggtgctaggaactgaactgggttttctacaagaacatccagtgctctaaccattgacccatctctccagccccaaatgttacactttttaaaccagtacttgtcctcttttctcacaagcgggtacttatttctcagtgttttggtatcttactgttgcttgaattttgggagtcaaaacctatgctctggaatcttaagaaagctacctgtctccaataaacaaggaataagtaatagtaaaatacagagaaagataaaattactctctgtggtacgttggcaagaggagcaaatggaagtcacatccgtctgtggactcctgaaatgaggtctaagaggcatgtgtaacttggacgtctttttcaaggtgtggtcccactcatcaacttgcctctattctctgctttcagaactatatgaaaatatagttcctcctcttactgccaccaaggattcagcctttcccttcctttggcatggaattcctaagaaaattttaatttgagattcattgtttcattagtttgatagtcagagaaagacctgagtgtctgtctttagaatatctcttttgccaagacagttatattaccaacctataagaagtcgcctttacagctaggtatagtgaatcatatctagggagacaggggcaggagggtctttttgagtttaaggcctccctggtctacatagtgaattctagggcagacagctatatagtgagacctccatccctttaaaaaaaaaaaaaaaagacagaaaatgtaaaaagaagttgcctttagcttgctcttctgaatcactaattaaatcactaatgtacatgtccttcatactctaaggctcgaagcataactgtgtgatagcatattcttccatggtaagggctattttctcagtagtgcatttcacactttaatgtacacaggaatcatctagagatctttgaaaatgcacattcttctcaggggtgtctgggtggcacagtctttttaaaatacactttttattgaggactttttacaatgtatttttatcatattttacttctattcccaacatactcttgctgttcattcttagatcattctggttttttgagagagggtttctctttgtagccctggctgtcccggaattcaatctgtagaccagactagcctcatactcagagatctgcttgcctctgcctcccaagtgctgggattaaagctactaccacaactgccaggctcacctgccctctctcccccctccctcctcccccctcccttcctttctctcttccctttctcccccctctctttctctttctttctttttataaatcttttaaaaacatactttttattaattgagactttttttaacaatgtatttttatcatattttacttccattcctaccccacttctcccagatctactagatctactctctacctctttgctctttccaaaattgtcttcctacttatcctgatcccgtaaaataacctgttgagtctattttatgctgcccgtatactcctgggtatggaaccatccactggaccatgaacggctggcctatcagaggctaaatccctggagatggtagaccctcctttcccaggagccatcaactgtcaccagctccatagggactcatgagccctttttcactctaaagtagcaagatacttgatgattgattttagatgaacttatattcttaaagggcttttaggtaaaattctctattggttgtttaaagacaaagaaaaatgtactcatgactctagttttcaaatgaagaaagagacatttaatattagtgagaagaatcagatgtttttattaatcacctcagtgttctatctgttgaggtatgggaattgtcccacaaaccactccgacacagacctcagtcaaacagggctggtttattgaatgcacaccccaagactgatcaatcagggacaaagtctagaccagggagctgagctgcagtgacaaggcagaatcctatagagcttgaaagcctgaaatccacaaatgtctgcgtcaggttattccaccaatcaggatttagagacagggaatttccttagatacatgtctttgttataaattatcctgttctcattggttggagtatgaaactgtggtgggggacttgccttgtctagcactcatgtcttaacttgccaacggggatgtgcatgtctctctctgtcacataggttgtcagttctcaaggaggtcttggggacttaaacttactcaccccctactcaaaatggaagttttaatccaactggcttcttatgtagctgcagaggtctctcatataggggtccatcccaggacagcttaaaggcaagaccccataagagctcacacacaaatgcaggaagtgctactgggtgggtggttcagacccaagcttattgtggctaactagacaaagcagttctaattgacttctactgtgattagtttccaagaacaccaaagcacagaacaaaacagaatatacaatcaactccagcatgagaaagtttcctagtaatagcacatgaggaagttaccttataacattagtaacagtacaaaatgtctggctagataggcaacaggtacctaggacagttaccgttggacaatgtttgcctaatgtaactgtcatattaatcctgagttgatgggaagtagtcttaccattctctaaatgtgggactagttcaagaagattctaacgcccaggccaccctgttggcatttgaaaccagatttgtttgcttctagatcccatgatgatttccagtaaagtgctctgctgctctaccaggtcatttctgttaagttggtcacagtatttttattgccatgatgatatatatttagacacatgatgtgacaaagcacagtatacctactaaaaccaaagagagtactagggagaattcaaatatatagatatgcagaagaaatacaaataaaatgaggatagtagcatactgaataatttcttatctaaataattattcattgagatgtaaatattcaggcacttaaaaagaactaaaacagaagctcaatttaataattgtcttcataattgcataaggtcaataaagaaatcagtgtgtttatattttacacacacacacacacatacacacacacacacacacacacacacacacacacacacaccagaaagcctgaaggagagaagatacgtgtaaatcagtagaaggcttcttacaagtgctgtgaaaagccttaagcccctgctgcagacctgactatggttttgaacataaaatcttttccacatctaagtgttgcttacgcgatttctaatacttaatcctaagcctatgcttttctccgtgtgtttgtttcctttaagtcactggcactgaggaattgttggagttcactgtggagaaatctctgtaatccaccctgtcctttccccaccacaccattcaaacagtatacagtacccatccttttactttgtgcattggctcaaaatgctaaacaaattaaattttatttttaaaaaatccaaggcagggtgtggtagccctcagaaggcagggacaggcaaaatttaagagttcaagaccagcctggtcaccatagtgagtttcaagccaactaaagttacatagtgagatcctgtcttaaaaactaaacatcagtcagctgatcagtcaatctagctttttaagaataattttaacaacttgtagaaacttggttagtgaagcagtgctcgttcctttggaatcttcctgattatcatatatagaccagcatcaaaatgactcccacttctgcatgaaatgtttgatgtaggagcaataagagggaatgtgtgtaagcactgtaaaaaggttcttattgtgtaaagttatttacttcttgcagctgtattgaaatagaatcccatttttgtaggtgaaaagaaccaaagcacagagtaatcaggaaacacccctgaggctctggctgcagtttgtccccaacttctgtgctgcttttccatgtgactagttagatggttgtcatttgggtcgacgcagtgggtttgcctcttagtctgttgctgtgctgtcccagcacaggcacgtgggctgtggtcgctggatctcatttactcctcatggaagcctcgaagagtagcactgctgtcgctaggctatacataaggaaacctgagattcagacattgtcagatatcatgcctttgtatatttctaagtaaattatgacttacaatattgaattttctgctctaaaagtggagatacaccaagcttcaggagctgttatgagggataataatcacttatgcaaaggatattgagaaacatcacacttaattgtgatttcccttgctttgttctctttcctcacctatacaatgatttaagaccagagaactgagggcacagtagtctgggattgttcatcctggctcactcccctttttgagaacttttccctttgcctcctctgccctgtgactttctccaagtagtaaatattcaggagggaaaaggtctttgagccccactttgttggatgtgactactcttggctgctaagtggcagttggagtttattatattgctttgcttatgattcatgttagtaattaccccatggcaatgctagttcaccattcaagtacagacaggacaagagacagcaactgtagaaaggctaagaagtatcttctgtcctttacctgtggaatggaagtacaccagctctaatttagaagatgaacagggatcgttgacataagagaatacagtcctgacatctccagtttcagcttgtgatttcctaactagtatagtgaagatagaattctagatgtgcaagaaaaagagaaatgaatgaaatactcatcttaactgggtagcatctggatttttctaggtttctccagcagagtaagacaactccgagtgccgggcataaggcggttgtcctttagtcatctgaagctactgactgcattttgtaaaacagcacagcttttctctttcctaagcacttatgccctggtgctccctctgggccagcactgtagagtcacttcagcatgtgtatttatagccctctcatgtgtgctctttaaacttactttattggcttttaatattttataattttgctcaagatcaccaaatatcaaaagtcgttagtttgtttttgattttcgtcttttcctgtgttgctataagtgatagatttaagacatatgggccagagatacaggccatgggtaaaggtacttagctccaagcctgacagcttaagttcagtcctcagtccttgtaacttctataagtgtgtgctggtgtctgcgtgctctccctacttcccagcacaagaagacaaataaacctaattttaaaagtttatttttaaagcaatgttaatgaaatgtagaacagaaattttatttctaactcttctgggtttttaagaattattattgctagccaggcgtggtggcgcacgccttcacgcctttaatcccagcactcgggaggcagaggcaggcggatttctgagttggaggccagtctggtctacaaagtgggttcaggacagccagggctacacagagaaaccctgtctcaaaaaacaaaaaaacaaaaacaaaattattattgctacattttaggtggcttttttgttatttgtttgtgtattaccattcactaaaatataacagagaagctagacatggttgtgtatatctgtaacctaagcactcggaaggcaaagacagaagggtactgaattcaagaccagcctctgctgtgtagtacaaggtagaaggcagcttaacatgcctagtaccccaggttcctttctttcagaaaaaggaaaacaaaaaacaagagaattatatataatagaatttccctttaagattttattatgctctcttatgatttctttcaaaaacatctaatagataattgtttttaagtcacttttatttttggaattaaaatgctttgtcatttttatcattatgctcatagcatattttagggtaatttttctgggatttttttccttttcatactaagaaatactagttttaaaattcattgttttcattttgttttgtttcttttctgtaaacannnnnnnnnnnnnnnnnnnngttttgtttcttttctgtaaacattgaaatgagaacagcccagagaggattgggtataggagtcactggattcatttgttccttaaaatagctgttacattgtctttccagatgggatatttgtagcgttgtgctgtgcgtatgagacaccaccaggctcatgtgacttcatagtttaacaggttgatctgaagcaaacttttccacagttcaattcaaatggaaggcgaccgattcctgttcttggaaaatgctgaagattgctctgacatgcaaatatgttctctctgcaacctgcttttgcaacctcctcctcctcctcttctacatcctcctcctcttcctccttcccttcctctcctcttccttctcctctggctccttcctctgttttttaaaaccaacatattttgttgttgttgtttttctcttcagtagctaaaattttactgaactatgtgttctagtctctttactcggagacgtcctaaagaccagcacataaaatatagcccaattttgatccatccattagctgactgtgagcatccacttctgtgtttgctaggccccggcatagtctcacaagagacagctacatctgggtcctttcgataaaatcttgctagtgtatggttggagaagtagctcttattaaaaatattattttgaagattatgttgttcagaatgaaaagatttatgaaagaagcctttgttgtttttcgctgtagtaaaggtgtttattattagtgtgacttcccatgtgtaacttatactgtacagtgcctttcctctctctcccatctcctccagtatccttccctcccctttctcttgttgtttctatccagctaaccttttatatacttatttcttaaaatgatttttctagttcaaactaacaaacttctgagcacaaatctttacttcctctattctcaggacattgtagaacaacagaaatgtactctcacactaggactcacatagacgggacaaacgcagcagagctgagactgtcaagaggaaaagaacaaagaaagtagagggattaattcattttatgaggataaaaactaaatgagggtgttttgatgggtgtaacagaatagaacagatcataatacaaagaacacacacagcaaagtgctttcagggagatgggagcttcagcctcgaagcaaatacaggaattgtcattgccagaattctctagagtaccaactggtatgtatcaaaattatctgagacttataaaaacacaggttacagattgttaggtacaaccccaaagtttctgggttggagttcaagaatttgtgattctaccatgttggtggatggtggtggtgggtgtctgcaaacatgaagttcctggacccttgcctcagagacccatgccagtctgtcaggaacttgcaagtgtgtctgctcctcttcgggtaaatcagaggtatgcagcttggattgaagcctagtattaattattgtgcagtgcataatctatacacatgtaagcaattctgtctaactgtgggaattgtcctcataaacccattgcaagctgtgaatatcataagtcaaaaatgcctttgatgccattaacccacagagtaacttgtttggcctgtcatgaagtggctgccaggaagcttgtaactctgttgctgccttgtactgaagagatatcatggaacatattactaactgggaaaagagaattcagtttgaagtacagtttccacataatgtatactactttcatgctgtattaaaaagtaagtgagcatcctgtaagtcagggaccatctatacatgcctgaccagctaaccttcaattttttgatgggttctttttttgttttggttttggttttggttttggtttggttttggtttttttgagacagggtttctctgtatagccctggctgtcctggaactcactttgtagaccaggctggcctcgaactcagaaattcgcctgcttctgcttcccacgtgttgggtttaaaggcgtgtgccaccaccgcccagctcaaccttcaaattttgtatgcacataaacacccaggcatgcagtttcctattgatgtcaaatggaaaatctgagcaggaacagctaccctgagacttctatagcagatctgagtgtgctaggaatgcagaggtaatttttcctgggaaggaaaatacaagaaacttctgtgctattggattaggttacgttacttcttatcttcgtatcaaggagtacttggttcattttctctctattcttctctccaagaaagatcagtgtgtgtgtgtggggggggggggtgggagggggtaatcagggaaagaatataataataataaataataataacggaggaaattttctacatctgttgataacatagggcttcactcagaaaagacccacttggtatgctaagcatgatgagtatacatttggtcatatcacagttagttaaggagaatgttaaaattatttatggagaataaaatgcagatcaccgttgcagttgtcattcagaannnnnnnnnnnnnnnnnnnnnnnnnnnnnnnnnnnnnnnnnnnnnnnnnnnnnnnnnnnnnnnnnnnnnnnnnnnnnnnnnnnnnnnnnnnnnnnnnnnnnnnnnnnnnnnnnnnttacctaacaattttttaaataattggcctgttgtgataatttttcttttattaaaaaaaaaagttttcttctggaaagaaggctcagaggttaagagaacacactgcttttccagagaacccaaggtcagttcacagtatccatggttggtgcttagaatcacctgtaactgcagctttaggggatctaaactaagcgagtgcatgcgtgcgcccgcgcaaacacacacacacacacacacacacacacacacacacacacacacacacacagagttaacaatactaaaaatccatctttgaaaaatagcagatgagtaaaaatggtaagataaaataaaaatttaagagttcatacttgtatgaatataagtgtctctagaaaatactgctgattgagccatattgtcagtcaccaagtaattgtcaattcaaatatgttctatacccataagtttcttgattattccccttgaattttgaacatttcagaagtcatgttaccaatgggtaatttagttttcaggctagttcaaacaggttattttatgattactttgaaatgttgtccttgtgtaagaactttttataacatggtttccattgaacaactaaatttatagtgaaaaatagtgggtcttatcttccttccatctggagttggatggcctgtaagcattaaagtttagttgctgagaaactagcaaagattcttctaggcattaataatttaatatatgtcaaaaaattacgttcattagggttctaccacatataaccaaatgcattttctgtagctgtttcatccacaaattagtctttctgcattggaagtatgaactctgcttcattttctgttttctgtttcctggtcgagtggccaatttctctaatgatcagtgcttataattaggatttatacttcaaattcattgttactatttcaaatgtaaatattaaggcttgttcagaaccttgatagtatcttgattttttttccccctatggaaagacaatgaacagcatacatattaagtttggagccagtttttagggtgccataaagctgtcttccatgacaatactctgatcttcctttctttgaagaaaggcagtgtaaaaagaaggcttctaccatctgtccctttatgaagatgttgaaaactgtttgaggaggagcaggaatggcaggattgatactgtcattttaaagtaataaaaggttacagtctcagtgttttcatgtatgtttgtgagtaagggggaaatagaaaaccctaaaatacgtaacttacctcacattttgttactcaaaaaggaaaataacatacattttgttgtgatactcttttgtctagataggtaagatttacccagtattttaaatttctttttcggtagtgttggtattaaacctagggtcttcacatataggtaagctctgtacaccggctgtatcacctgcccttaatatttgatcaacatgagaaaattacaactttttaatctattgtgacactttgttaagaatcttaccaaagttgcccagtggtggtgcatacgtttgatgctagcacccaggaggcagaggcaggtagatctcttgagttcaagggcagcctgatctacagagcaagttccaaggcagcaacgactacacaaagaaaccctgtcttgaaaaaacaaaaaatttaaagaattttacaaaacttttgactcatgtttgttgttcagacaagggcaataagatcttctccactgagtctagtagtgacggttatttgatgactgcctttctaggactttaaagtaagacacatgccttgagattcctccttagggttttctcatgaaccctgcacatagaaagttcggagaaatgcagaactccatgatcctttcctcttgatcagtggactgctcactgcttttcaactctacagtgtatatctaagactgctacatgcatctcattcttttggagtgacatcaagtacaggaactatagggcaactgaagtaaacttcacagtgtgtgtatgtgtgtggaacatatacatctcttaggatatgcttatttttcattagtttgctttttgttacaggtttattttcatttagctttacctataaaaaaacatgggtattgaaagaaaacatccatgtatgtgctatttattacaaagagacttatttaagatagaaaatgactatgctttgtcaaaaatcattgcagcccaaactcagaaaaaagtaaatttatgtattataaaatatatgttcgccaggtgtggtggcacatgcctttaatcccagcacttgggaggcagaggcaggtggatttctgagttcgaggccagcctggtctacaaagcgagttccaggacagccagggctatacagagaaaccgtgtctcaaaaaacaaaacaaacaaacaaacaaacatatatatatatgtgtatatgtatatatgtatatatgtatatatatgtatacatatatatatatacatacataaacacacatatacatacatatgtgtgtgtgtgtgtgtgtgtgttcatgctgtattcagacttgaaagattaacttgttttaccatacaggctaactgaattcaaatgtatatcatttttctaaaattaaaactttgcaaaatgccttaaattagaagaggatgtgttggaaaatgaaagttttgatgtagttggtatttttctgtctcaaagccatgcctttgtctgttttgtataatgaaaatataattgtgcttagtaatttgtctttctagatttgttgctctctatgtaaagaactatgtctttactttatacgtttaacatttttaaaggttttttttccacttgaaataacattttcaggcactctgtagttgatctaaagtgagagaggaaaagaagtaaaaaaaaaaatcttagctatgtatcacattctaaaaactcaggcacttcactgtcctggtgatttctagaccaacattcttgaaaatacaaggtttttattgtactttcaaaataatttacctagcaagataacatttcattagtttctttatgctaagtttttatactatatatcattttgaaattgggtgttgcagccagaatataaatcaaaatagtaatttcaaaatatactatatagttagataccttttcttttttatgagttgcctaaaaagataaaatgtcatgcagaaaactgcagtagtctcttggaggaaatgctctaaaactgtgtgactagttcaaactggttttcttcactgtttacagtttaaggcatgataagtacttttaatctaaaataaaatataagtgaaatctacttagtaaactattccgtaaacaacatctcggttcagtataaaaccatttaacagatttctgattaaatcatttcatgatatacaaaattttaaacgtacagatatatcacattatttaaatcataattgcttttagaccttaactttatggagttttttttttaatgaggaaaaaacacgttaaagtggttcaagaaagtaaaatggcgtgcatacaagaatagaatatattttaatgtttaacacatcagacacaaacttcctttaaaaatattttctgttggagccggagagatagttcccaagaacacagttttcacagttgaacacggagcagtcccagtggcttagtcaggcagcttatattgcagattcattatcaaatatcttattttttaaggtctgtaggttgtgttggataaaattctcagtgccctgaacttcagagaacctggagtcacttcttctaaccgaccagtttttcatttttattgagttctgaattgtgtctgaggtgaagtagtaaacaatagggtcaaagcagcagttggaaacagcgatgcagagagtgatcgggtacatggtcctcactgccgccaccacagagcagttaacaaaggtctgtgtcctcatgagcgagtacaaaatgaggttgatgttgtagggcacaaaacagaaacagaagatgaccaagtggacaaaaatcatttttaaaaccttagttttgttcattttgcttctacttaatgtaacaggtttatttaaagttcttagcaccatactagaacaagttacgttcaaaatgagagggataaaaaagcccactatttcaatgaaaatcacaatcctggagagataagttttccatgtggccgctggaaagttctcaaagcaggcttctgaggtattgttcccctgagagtgggtcgactgaaagaaaactgcaggcgcacttcctcccatcactgtgaaccacacagcaatgcaaacgatctttgcatttcgtttcgttcttaaagtctttgacttaaatgggtagacaattgccagaaatcgatctacactgatacaggttaagaacagaatgcttccatacatattggtgtaaaacagcattactgaaatcttacagagtagatctccaaatggccaattccgtgttgcaaagtaaaaaatccgaaatggcaaagtaaagacgaaaagtaaatctgacattgccaggttaatcatgtacgttgtagtttcatttctcactttgagggcacagatgaaaatgtatatcgcaacacagttggatatcagcccaagcacgaagaccatgctgaacatgcacccgtacagagtgtacttaaaggagtcgtcataagggcactgggagccattggagcttaccattgtcaggcagtgcagcttacaggaggccttttgtccgcagcgcttgatcgatcgcctttgctattcagatgtggtcacagcagcagccagtttatttgcaaagtatttgtttcttttcctgttcttacaaatactttcttctcttaactcttcaaaggaaacatgaaatgtgttccgtaaaagtttctagtagattattcaggaaaatagtctgattttctggtcgagaaaatccatgagtctggagtttagttaactgacagaaaatgcagtcaaggaagccaacccataaagctgaaagtgtaaggaaaaactgttccaagtcggaccagaccagtccgcgtggaaacttgtgcttcagccgccagggtccaaaccagctttacttcagtcacaaacactcgccgtgcgtccgtccgcccgtcgtcctcgggtacttcttccttctttttattctcaaactttgtatttctacattgattccggacggcgataggcagtcgtttaagggatcccagataaattcctaagcatgttcgcgcttgctgaatggagaggcctttcggaggttgccagctgtattgtgagatgggctgtctctgaagtgagcaagaaagccttcccagatttgtaatatgacatcacaggaagaagaggctgggtttggacaaaggaaggcttcaacccagttgtttgcagttcctttaatctgataatgtgtctgctgggaatgtacctaggaggcttgcaaatggtcactggctgcccagctgagttgggtgttaactctttttatgccaaaatgctttccggggattctgacaacttctccaaagtggtttgatttgctttagttagtaataagtaagagaaagaaagaaacataaggtagattctttctcttctattgctcttgtagttgggatattgccttctttaaagaaataaaatgcagatgggtgtatatatgtttataaattgaaatgtaggcgatatgagtggcacattaaagaactgtttgtgcctgaaggcagaaccttaagagtttatataaagcctttgactgaggcaggcagtcctgcttctcttagtatctggtgttttttaattgctctccagcatttaacttaattggcatgattgtgagtagctttaatcctggatctctttagtttttgataaataatgttctaacatttttctttgaaactaattttctagagctagttcaattttaatacaccaaagactacattaagtatgccccccccccggaggattataactcagtagtgagaatagtactccaaaacttttacttttagtacagtgtcagtcttttgcccacaacttaatataagcatagtgggaaagtgtgctttgtaaaacgggctccccccttctgagttaattgaaataacttacagcagagaatctcagttctactgtttgtctaaatgtagtttccatgattttattctcctttcctccgtctctcccttcagtttcttttacatgttggctgtgtgttggggtatattccagatctactttcatctctaaatttgaagctgaaacccttcatttggggtcagtgaaggcatttcagagcaagtttctctatagacaccttagtttacatattaagatgtatacttaagagcatgtatcatgtgttctataccttttaaatttgattacttttgatggtgaattataatctttttattgttttgattaggaagtcatctatgatcaaataatacagtcttataggcggtaaagattgagggtctgaacttctttgctttggttttggtgtggaaaacagatgcaaatgtgttcctattggaagatgggaactttgagtgcagtaatgaaaaaagggacacttaataacattttcttctccatgaagaaacttttctgttaatagttattttaggaaaaatataaaatttgagtgatccacttttaagtttccttattgtcattttaaaaaacgatttattatgtatacagtgttttgcttgcatgtacacctacagttcagaagagggcaccagatctcactatagatggttatgagcaccatgtggttgctgggaactgaactcaggaccttaggaaaaacagccaatgtgcttaacctctgagctatcttgccagcccccttattgtcatttttacaaattataatcgttttatgtcctggtactgtccatgtttactttcattgtgaaaacatgcatgaatgtgatatacatgcatatatgcaggccagcacttatacacataaaaataaataggtctttaaaataaataagtaaaatatactgtcagctgatttttaggatgttgtgatatgtagattataccttagtgaaaaagagttgtagaggaaagtctgtctaaaagggttactaatttgctgggcgtggtagtacatgcctttaatccttatacctaggtgggcatgctggaaagatgtcttagcattttggagtacttcctgttctttcaaagggcccaggtttgattgtcagcacccaatggcagctcagtcctgtctgtaactccagtcccaggatatccagtacccacgtctgactctgcaggcactgcgtgcactcagtgcacagacatacaagaaggcaaaacactcatacacaggggggaaaaaaacttacaaaaggtttttactttaagatttgcaggttggaacagtgttggagctccatgtaggaggccctgtgctcagactccagcatcccagcaagtgattaagtgaaactctaacaccattctaaacaaatccattctaaacattattcagtttaaatgtaataagtgttaactaaaataaaatcttaaataataatttatttacacagtggtaaaataaaaacgatatggtagtctgagacacaaaggaaggtttatgatggcaggaatctgatacattttattttagaactgtgtatgtgttgcctttatgtaataagagtatccgggaaagtctcctttcagctctgaaatgcactatggatcttcacatgtgtatccatgtgtgtgctttcctgttgacaaaaatacttagttgcgaaaggacatttgttattagctttgttttaggaaaagcatcaaatgtcaaactacaattctagctaagcatattatcagttggtagattaactatatatggttcagtgcagagtaaagtttaccattttagtgcacaggatctgactccagggcccttgaaatctccttccttgggccctggttttatcctacctttctggaactctgagacaccatgactcagagcacacaagaagcagatttgaaggaggatttcaagccttgctagctattctccaaaactatctgctattctccaaaacaaatccctgaaacacttgaagggttttctctatagaaaaatctagaaggaatctagactgtcttttactagtgtagattctttatgcatgaataaagcatgtgctgtaggcaataaaaagagactatacatctttttctaagggggtcggggagtaggaaaatgcagtgcaaagagctcccagcagagaactctgcttgtccttttcagtccttttcctttgctcctgtggggactctggcttcttggctgtaaaagaaaggaattaggctctacaaagttcccttcctgctttttatttgcttcagattccttgaattctttgaatgtttaaggtgtcacgtttgctttctcactctttggtatcaggaagtcacttttatccttactgtttaagaattttgaaactagcctggacaagacatgtgtaccacagaggggaagagggaacagagaggaagaaatgtgtgtaagagacagaatgaatgggccaagtcaaagttccttattacacccagtaaatcagcaggactctattcttacagggaaaggcagactcattccagcactcctaatcccagccagttaatttggtgaggccctggtagaaccacaggaagtctgaagcagatgtggggggaggagcagaaccaagagatagcagtaagggccctggctttaagagagttatgacccctctgcaccaccagcctccccgccctacccccacaccccagaccttgagactatgaggtctctgggggggagaaacagtctggtggtttgtgtctataatttcagcaccccactggctaaggtaggaagagagtgtttgaaagcagcctagggggctatataatcagttcaaggaactacacaggcgatcattttgtctcagaaaacaaaggagattctccaagcatgtcttgaaagctctagagccagagttcacaaaaatgagtccttttgtagtcccattagtataatccaaatacttttcacatctgaatatacagaaaattatttgttctttgaggaatactaaataatatagtcccaccctaaattcttatcagaacagtacagggaatgctttgggacataagggtttaatttgattatgaaattctagtaaatgataacagaatgggttgctttcaaaagtcttccaactactttggatgaagtaagaaatagtggaaagaccaattaaactagattcctattggcctggtttttaatctttggtattgtcttagtcagggtttctattcctgcacaaacatcatgaccaagaagcaagttggggaggaaagggtttattcggcttacacttccatgctgctgttcatcatcaaaggaagtaaggactggaactcaagcaggtcagggagcaggagctgatgcagaggccatggagggatgttctttactggcttgcttcacctggcttgctcagcctgctctcttatagaacccaagactaccagcccagagatggtcccacccacaaggggcctttcccccttgatcactaattgagaaaatgccttacagttagatctcatggaggcatttcctcaactgaagctcctttctctgtgataactccagctgtgtcaagttgacacaaaactagccagtacaggtattaaaaacctaacctttattaagtaatttaatttctgttatagttgtaaaaagttgtaaaaaggcaatattgaattagatctctagaataatttttaccttagccttctgttttaaaatttcaaaaaaaaattacaattgaagaaacttgaacttagagttatgatgtcttaggattgcacagtggggggaggataacaagcccttactttataagtactgaacccagttccttatacatgtttgtcaagtgaaaaaaatacacgctgtctgtgcataatggaaagaaatctaatcttaaaataaaaggatttttggttcttaaatttggacttttgccttggataaaatctatcctaaccatgccctcctgtcttaatagatggtttttaaaaacaaaatgaagtgaaataaattttggttgtaaaacacacacacacacacacacacacacacacacacacacagcatgcacagcaagtaacaaacaaaaaatctagtatagatgcagtaagccacagtattctaatctttcagatacaggtaaagttgtgagatgacatagagcaatgggtttttctctcattactttttagtgagcaggtaagagttcctgtgcttcatgtatgccttaagtgatgccatgtttacagtttgttagttctgatcatgggttacagaagctggtcttgcagtagacagagacttgccttttgagaaggattatgtatttgaattactgagcacctcacacattggactagttagagctctctaatgttgtaatagaacttcatcctagaacctaggacagtggtggaactcttggctagccagtttggtagcttggatccgatcatcactaaaaggctggagacatggccaagcagttagtagtacttgctacttttccaacaacaccctagttcagttcccagcacctacgtcagttgcctcacattcacttgtaactccggctccaaggacctaataccttctgacttcggtgggcacagtcacatataaataaaaataaaatctacaaaaagggaaacaaataaaaataaggcactaaaagctacgagttatctaaagtgtgaagtttttaaggaaagatacaggtttaaccagatggttttgttattcaccatgcaatggaaaaaagggaaaaaaattatgttttatataatattcaaaaataatttttcttttaaaatattttaaagattataattataacaaattataatataaaacaaaaaagcagagagggtctaaataagcacgttactttatccttaacttaaaagtttttagtactcaagtatagaatttttatctttaaaagtttttacctccaaaaatggaagtgagtgaatattgcatttttaaatagatgacatgtttttaagatgaattacatgagctctattgcagatataattaaaaccagaaatataatttgactttaggcatgtgggctcttaatccagttagccccagggaaagaggctctctctttacagctaggagcactccaaggtctagatgtagatgtgtggtgaggctctgagtcactggtcatcccaagtcacagcaaaaggcccaggagcacttttattagtctgacactacaattactttaatcaacagattccaattcttaggaaacgtgagggtttcctatcaatagcagatgttgccagcactgcctcaggtggctagaaacaaaggagcggaaggagagatgctgtcagagcctgaccttttgtttttgtttcagttaaacagaggtggaccctttgacctgaccaataaaggttgctgggttgttgtcctgatcacaaacataggaaaacaggacatgtactttaaaagtctttcctgccggggtaagggtgttgctcagtgtccaaggccccatccccagcaccacaaaataacaaaacaaaaaaaataacctttcctgcttatgttctctccatctgttcactgattttgtttattcaacatcagtattgactcagtgccagctgcttttccaggctctgggaacagcactgaataaaacaaaaaacctgtatttattggttttgagtctgtattgggggtggggtcagcaagtaagcattttgtggacatgtgaaaaacactctcactgctccctgaagaaagctcagaaacggaccaaggactttgctgacggggaagtctcaacagatgtgaaataaaactggcttatgcatatctcaggggattaactttagctggcctatcactgaaaggctgttctaatttatatttttcagttttctctcataaattcatccagtttctctcctaaagattttcacagcaattggaaatttctagtacaagtttgttttgttttcttttgagaaggggtttttctgtagtgggccaggctgcccttgaactcagatgcacctacccctgcctcctaagtgctaggattaaaggtggcacaacacccctggctggaaatttcttttcttttcttttcttttgtttttttttttttttgttttttttttttttctgagacaagctttctctgtgtagttcaggctgttcttgaatttacactgtagatcaggctggcctcaaacttggagatttgcctctgagctgggactaaaggcctacaccaccactgcccatcggaagatcattgatagcacctccacttgatacattcagcatgtctacttccgagttctgttttgcatgacatctgataaatgaagaaaggtccttacattgttcatcaaactgttaatagttcaaagaagtgaattccaggacagtcaaggctatgtagagaccctctccccttaccatcaccctacaaatcaccccatgttaatagtttcattacaagtcagatctctcatgacttctccctgtttagtcattaagtttttctcttttgctctttggtgatttggctatactctattgccctaagatactccattgtgttctatgtacaatttccctgacaccagcgtcatctgtagcatttattaactgtattttgtcccagctatgcttgaatgaacactcaggaacttttttcttcctttaatctttgttttagataatttatttttatgttcattggtgttttacctgcatgtatgtatgtctgtgtgagggtgtcagatcttggagttccagacagttgtgagttgacatgtgggtgctgagaactgaacccaggtcccctggaagaatagtcagtgctcttaacctctgatccattgctctagcccaacgctcaggattttatatcagtatcctccatgtcctttctccatgataacgtgatagtctaattttatatcaaccttttgattctgtttgccttttagaaacaacccctggcctgccctcctgtgttctgattccctggccacgctgagctacctgagcctgtgactacctttctctgatccactgagttgcttagtgtgatatcttccgttgcatgtttgcttagcgtgatgtcttccattgcatgtttgcttttccctaagaatgaatttttttaaaaatttactttgtatatgcgtgtatattataaatgtgtttaaatacaagcacatgtgcctcagttcatataaggggataaggtttggaaggaaacacttttttgtatatgatttttaaaaaccacccctcccttcctctcttcctccttcccttccttccttcctttctttggaaacaaagtcattctacatagccctggctgtcttagaacttcttacatagacctggctgggctcaaacacacagaggttcttctgcctctaatgcatcttttaaactgtctcttaccatgaatttctcaaagtgatttttttttttttttttttttttttttttggtttttcgagacagggtttctctgtatagccctggctgtcctggagctcactttgtagaccaggctggcctcgaactcagaaatccgcctgcctctgcctcccgagtgctgggattaaaggcgtgcgccaccacgcccggctcaaagtgatttttaactacaatttttttctaaacaatatgagaagtgaatgagttaatatatgaggtgaaaatgcatgttaattagggctcagtacctattgtagatatgtccagaatgttgcctgtgaaatattttcatctgtagactggcataaaaatttatacttacataaatttatggttatatagtcatatgcttttcttttttggggttttttggttttgtttggtttggtttggtttggttttttgttttttgtttttttgtttttttttttttttttgagacagggtttctctgtatagtcttggctgtcctggaactcactctgtagaccaggctggcctcaaacttagaaatctgcctgcctctgcctcccaagtgctgggattaaaggcgtgcacaaccactgccctgcatgcttttctttatatgaatgcacatttagatacttttggaaagtaggaaggtatgctttgttgtctcaaaagagttaaaaatcattccgattcactatgaactcagtaaaataaacagtctgggatcagaagtggtaaaagctaaggaaaatgtacaatttaaaggagagtattggattctgtttccctgctttgtaatatagaaagggcttctcaggccctagagagatagcttagtagttaagaacatgtattgttcttatagaagacccaagttcaattcccagaattcatatcagacagctcaaactgcttataactctgcctccagaggatgcctctgacctcaggcccagatacatgcatatatgcacataagtaaataatagtattttttttttaaaaaaaagaaaagaagaaaagaaaagaagagaaaaaaggaagggcttttcagggagcacttcatggtatcactggagatgaatctgacaagaagttttgccactagatgagccttaaatttaagagtgtcataaaaaaattgagtggccttaaataaaacaattaacaattactagtgagtaacatggaatctggtgatgatgtaatttaaaaaattttaaaagtaagtgtgtgtgtgtatgtgtgtgtagagcatgttgacaccaaacatatgctctacctttgaattccacctctaggtgaattcagttttgttaaacttttgtctatattaagtttcttttgcgtgtgtgcctttgcccaaaggaaccaaagaatagatgggataaaacaagatactatcagtaactatgctgtatgcagatagtctaagaacgacccaattaaaatcttaacagaacaggaactggaaagatggctaagtggttaagagcacttatagctctcccagaggacccacatagtggttcagttcttggcacccacatagtggtttacagtaatccataactccagttcaaggggataatatgcctttttctgaattctgtggacacctggcaccacacatggttctgatacatacatgcaagcaaaatactaatatacataaaataagtctaaaacaatcttgtcatagtagataaaaagcaaagctactttatgcagtccacaggaagcagacacagatatgctaaaggaatgaaccatgagtttagaagctgaatgaagccagcatccctaaggacaattgtcaaggtggagagagcagagagcaggggattgaagacatggctaccctcacagtactgtcagagctggttagtggtcagggaatgagggttcgtgctcgtgtttagacatgttagagatgagacgtttgtcatatattcgcatggaaatctttagtatccaatttgaaatgtgggcctggaatctgaaagagtactttagccctaaatgcatatctggaaatatatagctatggttaaagccacacagcagctctagtagtatatagattgacagagcatctagcattaaatgacaagagaaataaatggaaaagaactagcagaaaggccaacaccagaagttttctattttctatcctagtttctgtttgtgaggcaaaacagttttagaacttggcttagggtagaacaaaaacatttcctgtaatgtagatccaataatattccttaaaacacccagcaaacaatagcaattcctaccatcacttccccattgttagtgtttctaccagcactggagacttcacttttacttaggcaatcaggtctcttttaggagcattttgtttgaatagtgttgacatactttaatctctggaggagtttgtgcttgctttagaaatgcatgctaattatggaaagtcatttagaatgcacttagagcttccatttttctgacagtattgtttatttgatgagagtcacactaactttactgacagtgagaatctggtttccttcacaggattaggtaccaaagcaacgaatgtgtagaggacaattatgctgacagttagtttagccagataagtaatgtcatgatgcaacttgcctgatctggagagagctgctccctgagtgctgggtagcaacagtgctgcagagaaaaagaccagtgtcttacatcttccttcatagtgtttttaaaaatcaaaatttacctgtattagttattggctgaggtattagttatctattggcaattaaataattaaataatttaattaaataattaaatttattatcatatgaatttctgaaggtcaggaagcaccatagctgtgtggttttggctcctatattctcgtgagagatcgtgaagttgccaggcagcttcacagttagcttatggctttactggaatgggagaattggctttgaggttttctcatggctgatggcattggctgatggccagaggctttactgcttagccgtggcctctccatagctgcttggtatatggcagcttgttccccctactccagaagcaagatatgtgaaggcggaaactgtcagtttctaataagctaaccttagacgtcacatgctgtcactgttgccatatgccatggttacacagactaatcctggcacagttcagggagtgtgatctgtataatacacaggtaaagaatcactgttagagctctttgttgaccctggaagccatctgtgaaggttgtaggctttgtcagctagacagcaaatttgtcatcagctctcttatttgtgctttgctgtattcaacttattttacaatgtatctatgttatttgctaatattctaaaagtattactgaatattcatcatatatcagaccccggaattttattttgaagatccttttagagtcttatttatgctttgttcatcacctccttagatatccttaagtaagtttgttaccatattatacaatctgtgttttagctttgtggaactgatcatttcttccttttaaaaaaaaaaagatttattttaatatactatagttgtcttcagatgcaccagaagagggtatctgatctcattacggacggttgtgagccaccaggaccttcagaagagcagtcagtgctcttaaccactgagccatctctccagccctgatcatttctttcttaagggctatgtgctgggcgttgtgttagaatcatggcttgtgtctggacagaccataccaggctaatgcagttccacgtggctggtttattgtggaggcagaaacaaagggggtagcagagacaaaggaggaaaagagagagaagaaaaaggtgcataggccaggaagggtctgccttttatttaggctgtgatgtaaacatttgaaggtaaaggtgggaagtggactctgggaatggatacaattgccatggcaacagatgcactgcacggatccctgtcccctgtgggtgactttactgggttcagaggtgatctgccaagcctgttgctaataccaacaccaggtaccatttaaagcactttatacatattgtctcatttgtcatagcttggcttcatcaccaaaggttcataggttagaatcttggttctcagcatgcctgcatagttgtcatgagaccttttagctagaagtttgtcacaagtgagcctggcctggcctggcctctcctagtgctctggagagtgcttcctggcttaccatggaattccttcctctttcataggagtccctctaccctgaggtgagaacagctgtgtcacttactaggcctagcagtttactcttagctaatttgcatcttttgtaaaagatacagtatcttctcctagagttttataggaaataaaacaatgtaagtaaaacagtcatgccttacagttggtgcattgggaagagttactgatggttgattatgtgcaaattctgtacctatgttaggttttttaaatctctgacaaagtaccagagaaaatcaacctaaaggagtaagggttactttgactcatggtttaaaaggttgcatctccattattttgaatcttgttggacagagtatcaaggccataaatacataacacaggaagctgtgctatgctgaccaggaagcagagggaaaaaggggccaggattgcgatagccctttcaagatcacacctttagttacctcacttcctcccactaggccacaccccctaaacattttatcatcttccaatagtgccacaggctggagactaagctttgaacatgaacatttgggacataacccagatccaaatgtgacagtaccaaagcttttgtttagagtatcttatatggtaggggcttccattaatgtgttatttgtcttgccattttcagatgatggattgatgagattctgagaggtagaactgcaggtagggcagataacaggacagaaatatggttttaaaagctgcacaacaggcgaagagaggacagagaggacagagagcatagcttgtatcctagcagagtcactaagagcacaggttttagaatccagtagccttgggttcaaaccgattactagtcatgtgcatgtatgctaactttcatgcctctgattttttacctgtaaaatgcatagagtaatattatctatgttatagacatataaggattaagtgaaggaatgtatataaaatagcatgaaacctcacatgtagtagatgtattcttattaaatatgagagaatcatgaaggtagacttctattaatgaaagaaataagcctgattcctttgtgttattaaccatagtcatcaaagtattttgtgagttaacatgatctgctgtaaaagaatttatgattgaccagattcaatattaattctatgctttactttaacaaaaaagaaccatcatttcaaattaatgatatgtcgatacatagtttgttttgttttgtcaaggggaagtagagacatctctcaagctatgttttgtttacatctgctcctcaaaagagggcattggatcccatagacagatgtgagccaccatgtggatgctgtgaattgaactcaagacctctggaagagcagccagtgctcttaaccactgaaccatccctattctattcttaataaacagaagtcttaaaaacatagttatcatagaaagaaattatatataactttaaactctaatctgtattgctaagattatttgtaatatttcaaagaaatagtcaaagtttataattaaaaagtgggaaagatactgagctgtggtagtatgcacctttaatcctagcattcaggaggcagaggcaggtggatctctgagtttgaggccagcctggtctaagagcaagttctaggacagccagggctacacagagaaaccctgtctcgaacctccctcaccaaccccctaaaaaaatggtgaagaagactcttacagtcattctaagcataatctaaacttccaaggtctgaccttaaaagtaatgattcagttgtcagaattcctgttaaaatatcaaagtctgttagtgcaacaaataaaatactgagactgggggcttacaaaccacaggcacatagattttaacagtaatttaatttcagagaaactacatggtttataaaatcctgtgaactccatgtatctaggaagtaaagcaacagacacccaggccaatgagatgaatgttccggtgtgttaactagagtctgtgttgtgtcattgagtcacacctctagaccatagcgcgggtttttaagttttatttatttactgagattgggccttacttcaccgtataacctgggctgacctggaacttcttagcccaggatagctcagattctgtccttcttccttactctcctgagtgcttggattacagatgtgtgctaccatacccagcttgctctattttcgtttagtaacaatactgtactagaaggaaactattgttaaaaacttggcctctaagagtagtttgatgtagcatttaccattgtaggagtgtgtgtgtgtgtgtgtgtgtgtgtgtgtgtgtgtgtgtgtgtacatgcgtagggtacttggtagattcccaaggcagaaatctggtgattttcattttctggcctagagcgcatttaagaggcagggattctttgtgctcatttaatcattggatgtttgtcttagcctatttgtaaatcttaatcatagcattattgatggacagttcatgtctcctcatttcagcagtgcaagcatatttatccctggcttctgaactgcccttctgtgcttcctcattcacttacaactttctcttccctttcttcaaaatgtggccaagcatcctttactttcatcacatcctaacttcctttcaagaccgtttatgccttgttccctttttaatgtctgcttctcacactgtatcagttccccttaaagtattaattcccctccactatgagtctttactcattttgcagatatttgccgttatttcagagcactttctgaatttgtaatcacaaggttagttcttgcaagatcactgtctgtctcctcccactagactacagaaagctgacaggtaggaagcatgtctgtttgctggccactgtcatacgggctccacacgtgcatgccttagttcagagcctgatggtttgctgttgagaaggatttctttttactcgccgtcacacggaatactttgtcgtattacttggtgctttactctcatgaaagcgtttgagtcttgttggacagagtatcatgctcatattttgtggctatgatgcatattattatttggctagtattgtgtggagaggattgtaagaaagaagattcgggtttttgtttttctgttttgttttttgaggcagtgtttcactgtataggtgtaactaatcttaaactcaaggtaaactcctggctggcctagaactcacagagatccatctccctctgttgagattaaaggagtgcaccaccacatgagccatatccttactttaaagccgggcatggtggcacacgcctttaatcccagcacttgggaggcagaggcaggcagatttctgagttcgaggccagcctggtctacagagtaagttccaggacagccagggctacacagagaaaccctgtctcaaaaaaccaatatatatatatatatacacacacatacatacatacacacacatacatatatacacacacatacatacatacacacacacccatatatgtatacatacatacgtacaaatacatacatatacatatgtatatatatgtatatatttatccttactttaaaatagaattaatatcaaggaatttggaggactttaatcttctcactctattaatttattcaataaatgtttatttagcccctactatttgcaaagcagttttaaacactagaaataactattgtgaactggtaaaaacccatgcttttctgaatcttgaattttaatagagatagttaataagcaaggaaacacatatagtgacaagtcatgaccagtggccagtgctgtaagattggaacagttgtgcgtgagatggattgggagttaaaccctcttaacaagatgtttggagaagcttcactctggaggtgctgtttgagcaaatgtcaataataatgtaggttgagccttgggatgttctggggaaagaatatccgagacaaagaaggagcaagcacagagggcaggagaaaggggcgtgggctttggttgttgcatggttgagaatgattggttcctgttatgcagagatataaagtgacgatgctgagtgaaggacaaatagacatgtgtactctggatggatagttaactcggcttctgtttacatttgaaagatatgttattcttcggaaatggcatttataaagactataaccatagtatcatcaaatacttatactttgtgttaaacacgaagtgtctaaattcttatctttgtatcatctgaattcacaatactgtgatttaaataatcttaaccaaatatctctacttttcaaagtagaactttaagaaaagtgaaccttgggctggagagatggctcagcgggattaagagcactgactgctcttccgagggtcctgtgttcaaatcccagcaaccacatagtagctcacaaccattcataatgagatctgatgtcctcttctgatgctgtctgaagacagctacagtatacttagatataataataaataaatccttaaagagagaaaagaaagaaaagcgaaccttgctgggtgtggtggtacacaccattaatcccagcattcaagaggcagagacagaaagatatctgagttggaggacaaactggtgtatataacaagtttcaggccaggccaggttgtatagtgagacactgtctcaaaagcaaacagaactggagaggtggctcagctattagcagcatttgctgctcttacagaacacctggctttggctctcagcacctatattgtagctaataaccatcagtaactccagtctctgaggatccaataatgtcttctggccttcacaggcattatgtacatgtggtatataggatacatgtaggcaaaaatatacatatatataaaatttatgaaacttttaaataaaacaagaaaacctagttccttatgttttttgaaattaggtgaatgaaattaagatgggtaagaaaacataccatctgggtatgtattacttagatatgagtaacttgctattcaaaaggactattcaatagcttaatttactgggcttttgtaatcatggttctttgtatacctgttcttattctgaataatgacatggagacttatatttatttataaaagctttggtcccaaaagtaggtttgtttcccaactaattcatagctcagttatcccatttataacaatctaagttctgttgcatgggttgggagttacctctcatttctccctgacctgacttttcccctgtgttctggtggcacctggctccccgagttcctctttctgcccagatgttccaccttactattctgtctttactataggtcatacgctttttattttcaccaatcggacggcgccttaggcaggcaaggaaagacaaagacacatcttcacaaagtatacaaaaacatcactccaacaggttttctttttatatttcttttctgaaatgtttctttcaagatactttttgtttgttttactttgtcgctttcatagtagaaacttgcctgaaagacttgattgtcattcatgtgtaaatcactaaaagttagctggagactgtgtttatacaggagggcttttgtgtggtgacttgcatgaattgaatttcattataaagcctttggtttgctaatatctatagttctgttctcttagcatatcttgatgcttatcttttcatacctggagggtatggtcatagtttgaagcaccctaggctgtggatacaggaagcagtctgggatatggaacattagtgatcataatgtttcccttatgctgccttccttagtagcttcttcttagatactgtctagagacttcaggacagccagttatgttttatattcaccaaatctctctctctctctctctctctctctctctctctctctctctctctctctctctctctctctctctctctctctttaatcactataggtaggaaaagaagaggaaaatgccttgtttagcttagctttaggtggacttctgtaatcttcctgttgctaatttccctttagcctcactgcccaaggtatctggtagcctggctttcagaccttagaggataaagagttcatgtgaggactggaaagatgtttctgtggttaatagcactgtctgttcctccaactcccatgtggcacataactacctgtaaccccagttcaaagacatgataccctttctggctttcgtaggtactttgtgcacatggaacatatacatgcagataaaaaagatatacacataaaatcaaataattaaaaaaaaaagttcatttgacttgttgcttttctttactgttaggcttccagctaccattttatcatagtgagtaggttagcacttaactcatgtcttccactttcagggttttatatctggtatcccctgttcattctcgttactcagtagttcatgactttttttttcgtgacagggtctctctgtgtagccctggctgtcctggaactcactttgtagaccaggctggcctcaaactcagaaatccgcctgcctcttcccgagtgctgggattaaaggcgtgcgccaccaccgcccggcagtttatgacttcttatgttgaccatccttcactggcattgcttttttctttttaagagtgaatttaatgtaattaattgtggctttattattgtgtatgtgttcagaatttgttgtctttttcattgcaatttctatttcttaagatttattttatttttatttatgcatatacatgtgtgtctatgtgtctgcatgcatgtatgtacatgtgcaaatgcccacagaggtaagaaaagggtgttgggtcccttggagcagaagttacaggtgattgtgagctactttatatgggtgttaggaactgactggggtcctctgctctgtaagagcagcacctccttataatcactgagtcatttctccaacctcaggtttctggtttctgccagtgtcaaagtctcccttaacaacacaagggatcactgtaatttcttatggtatgctaactcataaaaggagatataaaaatgtttccattttctcaatttagaaagagctcaactaaaaggaagacatcttttctttgaagttttgataaaaattttctggttaaaaaaaggcttttctttatgtagcaattttaaattatggttcgaatttttgtttttattttattttgttttgttttgttttccagataaggtttctttgtgtagattaacagtgccagctctgtagaccagggtagctttgaattcagagatctgcctgcctgtgactggaattaaaagtgtgtgtcaccattgcccagctctgattcgattttttagtaatgacaagactactcaaattatattatttttccaaagcttttattgttcttttggaagtagagtatacagctttattcaggctaagaaggcattctacctctggcctattttccagcctaaattcaaaactttctatatccaaacatgatgctaacccatgtaatatatcatagacaaaaaatgtaactaaaatgttgataaaattatagtccaccatgtgtataagttatatttgaaacataaatgaaccatgtgcttaaactttggttttatcaccaatatatcttaatatacatataagtgaatattcaaaaaaaaatcaaaagccaagatgcatgttggaggaacacttgaggtcatttattttcctggttttgtatgtgcatgcacacagtatcagcactgtcgagtaagaactccaaatggagtaaaggatctcgcgctgccgaagttaatgctccttagccctgtctgtcacagagggagggcaacagtgcttcctagtcttctaatggttgctcggagactcactgcttctgtctgctaacctaggcctaggcctggaagctaatctagacctagaatgttttcagcctctgagacttactgctgaatatactcacccttccttgttctttccaaactctagatggctggttcagagttgctgttttggctcaaaccttcctccaagctgtttcaatttggcatctctgactgaattgctctatgtggcctcatactaactttggcaatgtgttctgatcttctggctcctgctccttttccagcttgttctgtcttcacccctgactactttctccattctctctctctctctctctctctctgcatggctccctccagtagcttctttttcctctctcttgagagttaggcgtatcctattctgtcaacctatctctgatttgttactttgtctgccactcaattagacatcactttcaaacttccttctccaaactacctttaccttcattgtttgggattaaaggtgtgtatgaaggctgtctgtattctggtcagcagggctaaaggtgtgtgggaagggatgagccacaccacactagaaatcattttttaacacaatcccaggttcacagtgtggtcagatatcctgcaacaacaaagcatggttttcatatgtactcagtaaagccatacctgctgatgttgttataatgccattttcttttatccaggattcacctttatttgatctcattaagcagtccaaggatggagaaggacctgataaccttgaacctgcttgtcctctcagcctgcctctccagggtaaccatactgcagcagatatgtaagtaaaggcaccgtgctttcattcaaactgcagagatactctggccataagggaagctcaaagcgctatatagaaattgtaggactgaaattttgcttaagatactattttttcttttaagtgttaggaatctaagacacatgacccaagtaaggtcaaataaagaagtacaaagctactgaatcacatggtgttggtgtagcggggaattaatcgttcatgacaaagctgatgctgctttagataggtccgaatgatcagataggactttagcatgagaattggaaaagcaagaggaaatatcccaagagtccgaacttacttgtttctgaaacagccagaaagcaggagagattttcagagaatatgtatcagaccatttggggagaggcacagagtaagtgtggagtaatggactattacacatcgctagtgtggagtggtgatgctgagagaagaaacagctgacatttagtcagggttccctgtatttggggcatttacataggtacgtcagattcacatttttccctagagttcataccagcctcgtaaggtagaagatactgtatcagcaccagttacctgtaaagtagcaatgagggaaacaagggagcttgcttaagatgcacataaatgaacccaagtagtcagatcacagtacatgctctcttagccctctagctttgtcctttcatagaaacgtgctccatgtttctacctgattcagtgaggaaatacagcattctgtgataaaccattttcctgtgatatcatttccatggtaacttccacccaaagtatttctgacccacagagactgtgtattcatgcatgagtttgtttgttaggtaatattttcacataagtcagctttatatgttcctgtaattcaggaaatggttatttgtaaagtgctaggttaacagtaccagttactgatatgattagatggcctggtccttttcccttataggactttgcatctcacaggaaggaagcagtgaacacatagactagtatgagtttagtttagaggactcatgcaacagtgaaaccaatgaaatgagaggaggggagacccaggagatgacgtcatagtttgactggagacctggaaggcaacgtaatgctgaccagacaaaacttttcctcttttgggaaaatgcctatattatggactagaaagaaacccagggtgggtggctcacagtcagagcagtaagtgtaaggctgacgcagaagcagcacactggagctagaggctctaaatgcatagatgttataaggtagtgggaaaccattcacacacaaatgcaactgtgaataatctgtattaagagactatctagttgctatttgaaatatgggagggcttgagggctaggagatgtcaagtcaagaaaatggaaagaaaatttcaaagactttatagtttaaataagggatgcagggactggagagatggctcagtggttaagagcactgactgctcttccagaggtcctgagttcaattcccagcaaccacatggtggctcacaaccatgtataatgggatctgatgccctcttctgttgtgtctgaggatagctacagtatattcatatacacaaaataaataattctttaaaataaataataagggatataggtatcttggactatcataaacattaaaggtggaaaagaagggtctggaatgtattttgagatagaaatagcaggttttatattgacttgatttatagcacatttgaggaagtggacaaattgagaaattttttttaaatgtatttatttttattctttaatccttttttacagtccagacttcatcctcttcctggcctgcttctcccccctaccccaaccactccccaccccatacatccttcaccacccaacctccatctccaagaggatgtccctcaccccccatcccaccaggtctccctggggcctccagtgtcttgagtgttaggtgcatcttcccagactgaacccagaccaggcagtcctctgctgtatatgtatcaggggcctcatatcagtttgtggctcgttgtctgatggatctcaaggatccaggtcagttgagactactggtctatccatggggccaccctcctccttcttctagctttctcctaattcaaccacaggggttcctggcttctgtccattgattgggtgcaaatatctgcatctgactctttcagctgcttgttggtcccctcagagggcagccatgctaggcccttgtctgcaagcataccacagcatcagtaacagtgtcagggcccagtttgggtcggtcacactggacctcttttctctcatgctcttctccatttttgtccctgtagttctttcacataggaacaattctgagttagagcttttgtttttttatttatttattattattattattattattattattattattattattattttggtttttcaagactgggtttctctgtatagccctggctgtcctggaactcactttgtagaccaggctggcctcgaactcagaaatctgcctgcctctgcctcccgagtgctgggattaaaggtgtgtgccaccatgcccggcgagtcagagcttttgactgtggaatggcaaccccatccctccacttgatgccctgtttttctactggaggtggactctacgagttctctctccccactgttggacatttcatccaaggtccctttgaatcctgagagtctctcacttcccaggtctccggtacactctagagggttctcctccctcctccttcccagggttacctgtttccgttctttttgctggccctcagggcttcagtcttgtttcccccagtacctgatcatgttccctgtccccttttctaccaaggtccctctctctcctcctcccataactgttttcttctccctcccaagtgggattgaggcatcctcaattaagtccttgggcttgttagccttcttgagtcctgtgggttgtgtcctgggtattctgtataacaggttttatattgatttgatttgcagcacatttgaggaactggacaaattgagaaattttaaaattgcactcctaggctctttacattaacacaccagatgtgatgtagtgacatttgtttgagatgagaaagactaggtgaaggaatgcagagttctgctttagccatagaaggtgtgaggatcaggtagtactatccatttcataattggatatttgcatctagaactcaagggagacctgcttttgtacaagttaagtaattttacagttgtcagttatgaaaggaaaggaaagtcagggacattggggtttagaaagttagcatatttttcctgttaagctagcttttccagtttgtatttaagtagctaactcctggaatttggtatagaatattaatcaaatagttaaaatatgtctgaatacatgagtacaattgaacacaatttagggttgggtgtgaaacgaacacttatcttctgtatgtatatctaggtatctttctcctctaagatctccaaagaaaagaacttccactacacgtgtaaattctgctgcaaatacagagacacaagcagcctcagccttccatactcagaagccattgaaatctacctcccttgccctgttttacaaaaaaggtcagtaaaagattcctctcaagagctcagactcatggactaggttaagttgtggctccagtacttaagatatgtgacactaagcatatcacttgatatctctatgccttggtttctttgcttataaatgaaaaaaaaaaataatataccctacaataatattaacttacagggattaggggacaattaaatgcatataaaatgctttaaacaggggttaaaccgggcattgatggcacacgcctttaatcccagcactcaggaggcagaggcaggtggatttctgagtttgaggccagtctggtctacaaagcgagttccaggacagctagggctacacagagaaacatcgtctcgaaaacaaaaacaaaaacaaaaacaaaaaacaaaaaacaaaaaccaatcccttttcaagtatagcctgtggggataaattgttagctttgaagagttctgtttatgcaagtctttaaaggaacagcttgaaccatgagtaaatgtataaaattcagattccttctctcagaagttgtatttgtagtggtactcttaaactaaatttctgtcacatcattttgcaccagtacagtttataattttcaagtttatgttccactgatatttatataaaaatgcatggtaagagcttttcttttaggattgggaaagagaataatcacttgcaattccattatttaaaaataatgtctctaatattgttttttaggtttttttttttttcttttttggtttttcgagacaatgtttctctatataaccctggctgtcctggaactcactctgtaaaccatgctggcctcaaactcagaaatccgcctgcctctgcctcccaagtgctgggattaaaggtgtgtgccaccaccatcctcccggctctaaaattgttaatggaaatttccaacacctatgctgaataattaccgacagaaccaaaggaaatcgtattttgtctgtctgatttcacaagatcatatgacctttcccttctgccttggtttcataatttaatagctaattcagcaagtattactgagccttgtgtatggaatgctgctaatactaggggtcatttatttaaggaaaacagccttggaggttaggctattgtttaaatgctacttacaatagtataaaggaatttaatgtttcaaaaaaaaatcccctcataattgagaatggacagtaagcaggccctttcaccttctgtctgcagtgtaccgtctagcatatctccgactaaatacactctgtgcacgccttctgtctgaccacccagagctagagcacatcatctggactctgtttcagcatacattgcaaaatgagtatgagctcatgagagaccgacatttggaccaggtaagaaaagcagtcacttccccatcgtttcttcctgctcatagttgactgtgtgctatatatcacattcaagtgaccatctacattagcttagtagtatatattaccatacattgtataacatacatagagttccttgttgaataccatttatattttttatatagcttttacaaattagaggtatatattttaataactatttaatgacacaaacatttaaccttttctgtattgtgataagctagatttcattttactgtggaaatgacatgagccagagaccagccagctatctaaccaggagatatggtgtatgcctgtaatcacaactattcttgagaggctgactcacaaatttgaggacttgccagcactacatgttaagttcaagaccactctggccacttagtgagactctgtctcaaaattcaataataaaaaagctggtgttgtagttcagtggtgaagcatttgcctgtcatacacagagcactggtgctctgatcctagtaacaaaaaatgatttacagccgggtggtggtggtgcacgcctttaatcccagcactcgggaggcagagacaggcggatttctgagttcgaggccagcctggtctacaaagtgagttccaggacaaccagggctacacagagaaaccctgtcttgaaacaaacaaacaaacaaacaaacaaaaacaacaacaacaaaaaaagatttacaaagaatcagagactccaaaacaggaatgtggggaggggaaggaaagtggggcttataaacagaataattcctcctagcttcctttttcttcttaaaggggataaaaaacatttagaggagtgtgtgcagtttatcaaagcatacatttttaaatgtatagttcagtgatttagtatatttgtagagttgtaaaactactaacacaatctattttatttaaaccattttctcacaccaaagagaaactctgttgtctctaagagtcctcaacaacataaatctactttctttttctgtagatttgtcgaatctgaacattttatgtaaatagaatcatatgtaatttcatatttagggtgtgtgtgtgtgtgtgtgtgtgcgcgcgcgcgcacgtgtgtgcaggtgtgcagggtagggtcctgactgagttctatgaccttgcaaatcctaggcaaatgttcttccactgaacttcgtccccagccttgagtgtggatggcttctttatagagcacaggttcaaggttcatctgtgttgtagtttctgtcacatactacattatgtttataattcatcagttgatagaaactggattatttcttctttgatgtattatgaataatgtcaatattcatatataaggtttgtaaaacatgtttttatttttctatgtatatgtaagtaaaatttctgggtcatatgttaaatctttaacctttttgagaaatggcagggatattttctaaaatggctttaccaatttatgttttatttttaaagatttattatttttaagtgtgtgtgggagggtgtttctatgtgtaggtacatgcatgtttacagtatctgtgaaggccagagacattgggtcccctggggctggatcataggcatatgtagctggtagctaatgatagcgaacatctgctttagagaagtgtgtgttaaaatcctttctgaaaagacagcaagagtcttcctcactgagcgtggcggtgtgcaaacagacctcaaactcacagagctctgcctaagtctgcccctcagttctggaattaaaggcacagccaccacaacaggcggcaatgatttaaaaaaaaaatatgttctgtatatatctttttctatgaaatatgtgttttgaaaatgttttatcctctgagaaacttcaggtcatctttggtttgttttttgttttgttttttgcttcttttttttttgttgttgttggtggtgatggttggttgttttggctactggtattttgatgtatgaacaaaaacattgtcaagtttggaggcatcaagacctcatttttcccaagagctttgtgctcttagttttctgtttcagtttcaatccactttgacttagttttgcaagagggcaggggaggacttctccctccagttgttccagcacaggagccccacccccctctttcctctcactctttctccttggtgtgaatccagggcctcttactttgtggcaaacacttcactgagctatgcccattcccacaccatctcttgaaatgcatcctttttttttattattattctttttctttttctctgttgacagctgttgaaagtctattgatttttttttttttttagtgtacacatgtttattcctgagactcatttccagtctgttatctatgtagctattttggtgagaatacactgtcttagttactatagcattccaattttttggaataaagagacacaattgtactttgttctttttgcaagatcaatttaactgtcctgaaacttaaatttccatgtgagttttaggactgacttgtcattttctctgaagattttgaaagaaagttcacgggctaatgtgtcagtttgggggatgtcacatgtagcatgaagtcttcaatccatacggaggatgcggctccttcccatccttccaggctttaatttctttcaataatagtttatagttttcagaatacaagtcttacatttatttttttaaagatttatttacttattataagtaagtacactgtagccgtcttcagatactccactccacaaaagggaatcagatctcattacagatggttgtgagtcatcatatggttgctgggatttgaactcaggaccttcagaagagcagttggtgctcttaactgctgagccatctctccagccccttacatttattttattaactatactcctatgtattctattctctttaataataaaggaaattatttttatttcattgttttgttgatctgtgtgatttttgtatcagcaaagtattagcttcatacagatagttgggaacttctaatttcagaagaactttttaagaattgatattgatattgagtctttttcttcttggaattttgctgaattcaccaatgaggtcccataggtatggggatttgtgtgtgtgtgtgtgtgtgtgtgtgaacacttactgtttagtaattcaaaattagcttttttacttttcagtcgatattggcatctgcataacttgaggaacttagtgtcatcttagttcttttagtggtgcataattttcataatattctcatataatcctcttatttcagtaagactggtaatgttcccaacaagaatgatattttaaacaaaaacataattataacttaacatgtatttggatgtataagctgcagtacactgtgtttttaaatagatagctattattttatgttcctgccactttctataaaagggaaacccagattcctagagattttttttttttgcaattccgagttttatgagtgaaacgtgaagatattaaagtagaagaagactatcagttggtctgtcgtcatcagtggcgctcggtgggaagctcagtcatcacacactgagcaggggtggggatagaaacctttgctcagagcagatggaagcaaaaatggtacagaaatgaccaacacttgaactagaccaaaaaagccgttttaaaaattgatatttaaggccccagggaatcattttcaaatcttagttttacattttaaatgttgttttattgaaagataccatatagaaaatccatttatcataaggatatgttctgatgaaaattgagcaacaaaacagatccagcctacattcagatcacagatcacaacaccatgagcaatgtaaggtctgtcagcagcactttcttactccctagattattacatgtcacttcagttgatagcttgaaacttttcacacagccttaaaacagtattcatcatacaattagcttgttctaagagtttcaatacttttgatatatactaaagaactgaagccaaagtcagggtactttacaaacttggtagtcagtcatgagtaattgagttagctgcttgcattttgttctgtaaatacaaatgttttgattaaataccttatgtagacttttgaacagctcagaataaggggaaaactcagaagaaattaaatttccttcttttaataatacttaaaagagccaggtgaggtagtatggtccctcatgcctctgtcactcgcttgctagattatgatgtgctctatgtatggcatctgcaaggtgaagaacatcgacctcaagttcaaaatcatcgtcactgcctacaaggatcttcctcacgctgcccaggaggtaggtagccgctcatggtaagactgaaaaataaatcagtattcatagtttacttcagttgttaaatagagatcatatatccttatttacttctttagtgttggttaattatttgtaactgaagtataattataaaactatggcaaactatgaaatccaaatcttcataaatagtactatatttgtatataataataactggggtatttgaaataaactttgacataacatatagtttttatttttccgcaggaaaagatactataagtcagtccttataaagacctagtaaaatttcccagtgcaagcccattttatacctctaaattcttctcccacagatgctatcatggtaaaacacacatagtctgacacacattttacactatcctggaatgcagcaatgaatcctgggttattgtttcagtctgtcattgtattcttggaaagtgatacaaaccagtttagtttgcattatatatttggagttattttctaaattggttatatacatattgtttaacagaggcactccataagatgtctttagttttacctgatgaacatttatacaagtgggacctggtgtcccagacctgtaattctcattcagaataagtgagaagaagatgtcacgaagtatgaggttgcatagctagaccctgcttattaaacaaaaacttgtttgtaaaaatctacttaaaaaatctgtttctactacgaaaaatctgtttcttgcaggagagtggtgtacatgttctaaaccctttagatgaggggttgaaagctgctacgggccagtgaatgttgtctgtatagtagtgctgatggtgctgggttttggttagcacagcctaactcccttgtagaatggccagcattctgtcggtggctgccaggccccttctctggatcaccttggtgacatttcactttaaatagggtacctataatttcagtctaagggagccttggttagattattgttttctgtataaaatgtgttttttaaataaaactaaatacaattattttaaaataaaagttaaagagaagttcttaaatttatttaacatgttttttttccttagacctttaaacgtgttttgatcagagaagaggagtttgattccattatagtattctataactccgttttcatgcagagactaaaaacaaatattttacagtatgcctccaccagggtatgttgaaaatattctttaattggataaatctaataacaatataatggatcctaccaaaatactacatcgatgattttttttcttttgttttgggtctagcctcctaccttgtcaccaatacctcacattcctcgaagcccttacaagttttctagttcacccttacggattcctggaggtaacatctatatatcacccctaaagagtccttataaaatttcagaaggtctgccaacacccacaaaaatgactccgagatcaaggttggtgtttcctttttaagggaatgctgaaaacagtaatactgcacttggcaattttgatttaaacatgaaaatgtaaagctttttaaaattcaaaatgggataggctgttgaatgtctgatttctttatgtgcatttagtgaatgtgtgaaaagggtttttttggggggtggggggcaaagaaaaggtgtgtgcctggatgggcttgtgtatcactcgtgcttgcctagctgctgaggtctcttctgtgtatagcttaagaaccgatatccacgtgtgcctcaaaacactaatagtttcataagccatcaaagtagaacattttaggttaacatgtttgtttgtttgaaacagggtctcactatgtagccgttggctggcctggaacttgctaagtagaacaggcagggtacatactcagagatccacctgcctctacctcctgactgctgagattaaaggtgtatgccatcacacccagaatctttattaaaaatttactgtaagctccatggattatagtgttttgcttgttatgaaaatggagtcattagggctggcagcatgtaccacccatgaaagtactcgccacagaactaatgacctgagtttgagtcctggatagaagaagcagagaaccagcttacaaaagttgttctctgattctgagacacttgctcacactcacacacacagatcattcacacacagaaatagaaataaggatatacgctttggagtctggctttgaagcccttcactggactacttaggtgttatcataggctacttgaaactggctggatgtttataaagcagaagtcccattaactagtatagttaatgccatctcagcagccgttttcagtacctgtagtttgtacctggtgggcaagaaaagtaaatgagaagaagcactttattagcttcttagaagctacccgagtagtacagtaattacatgagaaatgcacacttgtgaatacattttcaaactttgtagaaaaacatgaagtaaaacataactggaaatacggtgaaaggctgctgtgtgtgtccagatccctctctgtatgatgtgctttgtaactgattatctgtgtacaggtgtcctcagctcactgtgtaacatgctaagatgtaacaccatgtcttcttaggtaaatgtacagagtcccatgctgccacatgacttggcagtgtatactctggaagtttctgatggtgataaataatccatattatgattataatgatggctgtttgctgatcttaatcaaaatcagttctgtattgctattctttgttcccattaatttattaatttatttaccatacattctgattgctaccctcccctcttcccagttcctacctccccagttgctaatcttatttttttttcctctaagaagctttatctttcaatatgtaacccagggtagcttcaaactcactgcttcagtttctcaagtacaggaaggaaacaacaagcccagcgtgcattggtgctaattttagccagggaaaaggtcacactattaagcatcccaatgggcacatcactggtaaagcgttagagaactgtggcattctgttcatgcagcatgcttaggtactctgattaatcaaatgtgcgtgggaggatgtcacttaaccaaagagatggaagacaggacaatctacatagctactacttctttattgagctacatatagaaatgctttttcaccttaattatcaaaaatataaattataactaagattaagtctggtaacatagacctataatctcagctgcttaggaggctacacctgctggccaactcggtgagaccctgtcttaaactaaaaggtcaaagttttgggatgtagcttagcgatagagttctagcttaacacatttgacaaggccctagtttcaaccccttgtaatgtggctgaaatgaagacaaatggaataagtatctcacataacaaatagcatttactaaataccaatataaatactaattaaaatgtgattatttctttataagcatacattataaagttatatttcttgggatgagcggggctcgcatgccatggcacacatgggtaggacagagaacagctttgtagagactgttgtctctgaacacctttatgtgggtttctgcgatagctagaacccaggttgctaggtatgtggagcagttgcctatatttgctaagccatctcaccagcccttttttattgttgttttgttttatatttattttatctatgtggggccatgcatgctactgtgaatgtgtgtggttagagcacaacttgctggagtcactctctcctgccatgagtttgagggactaaacccaagttaccaggcttggccacaagtgcttttacctgctgagccatcttactggtcttttaagttttatttattggcctaagtttgtatcaaatgtaacttaaattagaatgaagttacatttgttgatttatgaggaactaagtaaagataatcttaagtttttctaaaaatcctctttaaatgtggaccatggcagaattatgctctgcaaacacagagttcttgttgcaaatctaagagctagggtgtagcttagtagtagaatgcatcactagcatattgaggctttcagcaccaaaacaaacaacaaacaaacaaacaaacaacctcttcctggttatgtcttaatcatactagcattggcccaacaaccccctgatgggtatcaggtgttggtggttgcaggggcagggagcctttgatatgtggtggctgagagtgtgcacctatgttcatctcggcatgtctgcacggtctgtgtctagttctcacaactaactcacattttatcttaacttgacagaatcttggtctcaattggtgaatcatttggggtgagtatttttttatgaacagtggtgtcatggaatgttatataaaatataccggacagtatgatgcaagagctatgtgcccctgtatcatcctttatttagtgttctgttgttaaacatcttgtgtggacatcagtgacttatattgcaactaaaaaagaaatagaagattttcataatttgagattaaaggcactgttgcctagataggtcctttaggctgtctcaggttattttcaaatcaggtttaactttgaataatattcataattgggaaacttgcaagttttttctaaacatttctctgagattatgtaatatacatgtaaatagtcatttgtatacacacataaagtgtttttatgttcccagtactcccaaagtgaaacataaattctccaactgtatgcatagctgctgtcatccagttcagtctgacagattacccagcagtctttggatcccactggctccagggctcaggtcattaacttcgcccaggtcgtaagtggcaagttcctgggttgcactaattttctaaccaaactggccaacagtcagggaatccctgtaatatctttcttttccagtttgaccatttgctagaatactcataaaactttggaaaatagtttactgaccatagcagtttattacaaaagatacagatgagcagccggatgaagagacacatagggtgatgtccactggggcttctggcccgctcctgtggagtccgcatctccagagctctcctaagcctaatgctaaaggattggattttgtacaaatagttgattaactaaatgtctacccactttccctactctgaaggttaggaaccgtggttgaaaattcccagcttctaaccagggcttgtctttctgactccatactgatactaagggcctatcaggagtctctttattagaacaaaagatggccctatcttccttatcacttgggaagttccaagggttttaggagcaggaatagaagacaaagacctcatatctttctatgtggtaacatgtatgtgtacaatctcatagaaatgtttacagaagtttgaagtgaggtcctctgaaatgaagcacaatagcctctgcagcatgactctggcactggcctcctcccacacccccgcgctctaacactccttcctgtacttactcaccccacctcccactgccttctgctccctctcggtgctagtctttctctgatcaataaggacctgaggtaaatgtgcttgctgcataagcccaggggcctgagtttgaccccaagaatccacatgaaaggtggcaggagaaaactgactcctaaagtttgtcctctgctgttggcatgtgcaccacagtacacatactgttatattcacacacagcgtgcacacatatataacaacaataaatacaatttttttaaataattggtttcatgatgaaccaagcacagtggtttataatctcagaagactgaggtagaaggatcaagaatttgtgactacttggaaatgaaaaatcagttctctctaatagtctctctgaggatacaaactatactttcagggcaggtcctgtacccagcagtagataatttacacaaaacaaactcagtggcaactttggaagttcctttttgtctcctagggctgtttttctttgtgtgtgttacagctttcagtttgtgtgttgagggattcttgcgtgtaccaacccgtgccctgcatccatatgcccacctcatgctttttctttggccctttttcttctgtgtatttgttttgtcatattttagttgttttattttatttattattattctttagatgcctgtttgttttctaacaaaagacagaaggggtataaattccagtgggagagaaaaatggagggaaactcagtgggagaggggaaactgatcaaaatatattgtatgaacaacatctagtttcaaaaagagaaaaaaataaaaaagagtttgtggcaaacctgagctacatggtgatttgtaggcccgcatgggctatatagcattaatgttgttttaggtgaaaacaaaagagggaaagaaaagggaaacagaggaagagaggagaaagagagggaacagctgtgtgcacaccctagagcactggctagttctgagccctcctaacaccgaggccctttcctggtgtgctggccccaaccagaaccttagttttgttgctacatcatactgtaattttgatattgttatgaattataacaaataattttggagatagagttttgccaaaggggtcttgacccacaggttaaaaagcactgctctagcggttggttggagtttatatgctaaataaaatgtaaaagttcattttacaaatcctcagtgctgtgacagctgattgaagacgggctgtagctgctgggctttacaaaggagctgtgggaccattcgtttacacctcacgcaaggcagctcacacaggtcatcacacttttgcttactgcagcctgtgaaacaatggagacactattcatccgcatagtaataaggccctgggacttagcttctgccatgttgaatatgtactctacatatattttcattaaattaagctgatcctatctaatgcaccaatcagttcatgtttaagttctatctgaaagtctaacttcatttgttggcttaactaacatgtaatacacatgcctgagacagtcatgaaatggaagctaagagacagactgtttccacatacttatctactgggtgagattgggtggtgtgcctgttctggcatgtcttaccaaggtcacatgtctagtaatattgcctggactaaaattgtgaagtctttgaatatttaagttaaaaacctttataaattagcaacatttcaacaatgccatccatgatgagtgatggttagtgatatatcaacatcccatgactcaatccacctcagggagtatatcagtcacggctcctatggccttccttcttgctatgtaatcctctaaatcacagctttttttaaaaaaggtttttggttttttgtttttttgtttttttgttttttttttttgttttttgttttaatttcagttctagaaataggatccacctttactacttctgagaagtcctggtttcaagcgttgagtgccagcaaggccataggcttagccagtgcttgacagcgcagggatagcacagaatcagagctgcttggatagatgggagaatcagctgcttgcatagatgggagaatcagctgcttgcatagatgggaggattcaggaggaatgggtgtttaatgaaggcagaattggcatccttatgctaattgtttttaaatctgtcacttagtccagtaaggcagagaattaaaatgaagagattacttttgcctaacttttggtgcatctcaaaataaaatttgtagctgctgacttcaaaatgtggctatttaatggtttaaaataagaactctgtaatttacagacatctgaaaagttccagaaaataaaccagatggtgtgtaatagtgacagagtgctcaaaagaagtgctgaaggcggcaacccccccaaaccactgaaaaagctgcgctttgacatcgagggagccgatgaagcagatgggaggtaggaaccatggagatgcttgctccaggtagctgagcagagcacagagccactgtcagccccgtcctgagtcccctcaggccttgtcctgccagtttaccactttgtgagaacaactaaagagactagatgtgggagaaggtagcctatgcctttaatcccaacacttgggaggcagatgaggcccctctctgggagatcaaaggcagccacagctatatagtgagaccttgtctggaaaaacaagagaaaacaacatactaagtgtaaagtggtacagtggaaagcaacatgcaaatctgccatctataaattcatgacgacttagacattacaagtctaagcatggacttacacagctattgatacaaatttgttagttttaacattaaattaaaaaactcttagaaaatactaaattatgctctataaaaaccactaaaaatatataagatcataaatttgtgatatctttttttagatcacttagaagcttttgaaattaaaccaaaataatagcatgtaattgaaagcaacagagttactaggaagttgcatgcatgcttttaaaatgtgtttttttttccccccaatctgcagtaaacatctcccagcggagtccaaattccaacagaaactggcagaaatgagtaagttcccctctcttactttgcaaacagggaagcagcatttgatttcactgaagaaagccttttgactctgaaggaatccacacattattccttcaagtggcacagttatttatgcatttacaaactagtagttcaaacaggagtatacaatttacctcacacattggtagactaagtgtgtttcacaaagtgtgggtcagcacactttgaatagtcttaagctgatgttgatctgtactttaaaatattactttttgaaattttgtacatgtatgcagtatgatttgatggcattctcccctcactggccaccttctctcttcttccaggcacctccccttaaactgcactcccagccttatctcctcttccttttccatagccactgagtccagtcagtgctggtggtatgcagacaactttagggccacccatggagcacacacaaaccaccaggggcttgttaaacttccttactctccaggctttgagacagttctaaacagaggtttccattactggaagtcagatttgtggaaattgggatcaggtctgtcagtgtgacagcaatttagaatggtggggtgaggggttgtcactgagtagcagagtgtttgctgcctaatgtgcacaaggtcttgagttaagttctcagcactgcaacagacaggctatatatacaatcaatcaataaaatgaatgttatttttggaatagtatgacaaatttaatttcaccctaagctattatgagactaaaaaattaagtagatggaaggaagcggtatttgctaagtgttctggttgtcttaggcacatagctgtggtagtaagagtagctgctgcaagacccagtaataggcaaagaaagggacttagaaaaagtagaagtgtttagaagcttgtgggggccactgccagtgaaggtgatgaggacttacaggcaggtactggacatgcatggcagctgccagagaaagcacacagcagagctgtacttcttctgcatacttttaaagccctttcccttaagtgtgtcgtttgaacctaaattaaatatgctaaccacttaaaatactagttatatgaattaatacatctctattatatctcttcaagttttgtgtgccccaaccccaccccaccccacaggaccccatgtgcagacatggtgggctgcctgcccctggtccacttactttcccagagtcctcagcactattaatattcttgttgcttttccagcttccactcgaacacgaatgcaaaagcagagaatgaatgagagcaaggatgtctcaaacaaggaggaaaagtgaggacctcagggccctggaccctcagccctggggacaccagactcctggctcatggttgtgactagttcccaggttctgctcatgttagagatataaaatgtgcaggtacaagctgaatatttgtgtgggtgattcgtaagccacttcaatgttgtaatcaatggtagagaattgatagcacacaggattgagaatcttgtgcagatcatgccatttaaaatatgaaagcaagttgtttgcatttccaacatgagcctgctgccctcagaagtgagggcctctgcaggggtcctgaccccctacatctggctgactactttgcctttcctcatggcacatgtgtgatgtttgctcttggttttattaatttatatgtattttttaatttaacgtgaatacccttagaaaatgtgtcttgtcttccaaatgcaagttgattgactgtccacattcaaccaaattatcttgaatcttctactgaaacagattgttacaaactgggaaaaagtactaatttctacacattggactattttaatattagaatctaatgtgccgtgtgtttgtttcacatattttacttttgaaatacaagcaaaaaaagtataatcatatgatactgtcttactactgacacagatttcatacctcagaccctctaagaaccgattcttttattcacccaacacatgctttgaactgaagactattgataatactccgaggttgtttttttctttcaatcattcagatcactgaatttataagtacccatgtagtacttgaaagtcaagtttggccacaactgtgcttaagaggaccctagtacagtacaacccaagtgcactttttaatgtttctgggtcctgaagaatcaagatacaaattaattgtgatttacaagcagactgttaactatagaagccttcagtttttttccctcatagacgtgtctaattacatctcaacagtttactctgttcttctacatctggggatgtttgtgttctctctggaatggtacatcttccagggtcttttgaacttgcagttatctattttttaagccaatctggtctaataactctggcttcttcaaagccacaccatttctagtccagctgtgcagaaacttcagatgaaaacagctgcattgaaaatagaggcactcccttcaccccccacctaaaggtgtatttaaattatcttgtgggattaacttatttagagatggtataatttaaaataggggatatttaaggtagcatcagctagcatttaagaaaatcactttttctaaactccatactttttgaaaagaaatctggtcttgttaggaaacaaatttctattttgtcctcaatttagtttcagttttactagtttgatagttatctcaataacaaaagcaatagacagcttcccccatttcttcattaagttttgcatgatcatcacacagattagttaggttttaggtcaagggcttaccatacttctaggtcttttgctagtgagttcaagttagaattagtgacagaatcataggaattttcagagatcctgcttcgagatttcttaaagctgcagacactgcactattggttttgtttttttgtaccggttgaaactatacattcaaattgctatgttcctattttctataatagtttgtctattttaaaataaactagttgttcagagccttactggtgtgatatgatctctgagttaagtgttttctgcatctgagctttctcctcacatcttttccattctgatgaccgacagatttacagaaatatactttttatgcattcatatggtatgtattatatattaatatattctgttctcttgtgtctccttttttatgaaatgaatttgtctaaaaagctgtatgctttgtgaggccctcccagaaacaggaaaaaggagacactaaaaacttgaaagcaacgtatacagcagggaatagaaagactgggaagagacagtaggcggctgtttagctggcagctgccggctgcagggccttcccacatttgaacattacttcgttgataaacagcaaatctaaccacacatgaaaataactgagaggaggccatgtgcagtagtgagttcagtgaagactggttggctttagaacaagagatgtctgtagggcctccgccaggcagggatacaaaaacataagatcagacaggaccacacaaatctgactgtggtacaaatgcttgtgatccaagttctcagcagctgaggccggagggtataagtgggaagccagcttgggttacatagaagatgtcaaaaagaggtggagaggagagagtggcagacagggtgggaaatgtttacaaaagatacatctgagaaagaactgttacctaacatatacaaagaactcttaaagttcaacagaatcacaagttcatttaaaaatgagccaaagacctgtccaggtatgtagtctcccctcccccagcctgaaacctgcttgctcggggtggagcttcctgctcattcgttctgccacgcccactgctggaacctgcggagccacacccgtgcacctttctactggaccagagattattcggcgggaatcgggtcccctcccccttccttcataactagtgtcgcaacaataaaatttgagctttgatcagtatgaaattgccttagctccgtttcttcttttgccccgtctagattcctctcttacagctcgagcggccttctcagtcgaaccgttcacgttgcgagctgctggcggccgcaacattttggcgccggaactgggacctgaagaatggcagagagatgctaagaggaacgctgcattggagctccacaggaaaggatcttcgtatcggacatcggagcaacggacaggtacacatgctagcgctagcttaaaatttcagttttgtaaagtgttgctaaggatgcggtaggatacgaattaagcttgaatcagtgctaacccaacgctggttctgcttgggtcagcagcgtgttaatcggaactagaaacggaaacaggcaggttagccgcagctttttaggaagctgcttaggtggaagaagaaagggtttaaagtcatggatcaggcggttgccaatagttttcaggagttgtttcaggccagaggagtaaggctcgaagtacaattagtaaaaaattttttaggtaagatagatagctgttgcccatggttcaaggaagaagaaacactagattgtggaacctgggagaaagttggtgaggccttaaaaatcactcaggcagataattttaccctaggcctctgggcgctcgtaaatgatgcaataaaagatgccacttccccagggctaagttgcccccaggcggagcttgtggtatctcaggaggagtgcctgtcagagagggcctcctcagaaaaagatcttcttaactcaaaaattgataaatgtggaaactcggatgaaaaactgatttttaacaaaaatcactcagatagaggagctgcccattaccttaatgagaattggtcctcttgtgaatctcccgctccacctgtagtccccacttcgggaggtgccactcatagggacacacgactaagcgagttagagtttgagattaagcttcagaggctgactaatgagcttcgggaactaaaaaagatgtcagaagcggagaagagtaactcttctgtagttcaccaggtgccgctagaaaaggttgtgagtcaggctcgtgggaaaggacagaatatgtctaatacgctagcctttccggtggtcgaggtagttgatcaacaagatactaggggcagacattaccagaccttagatttcaagttgataaaagagttaaaggcggctgttgtgcaatatggcccttcagccccgttcactcaagcattactggacacagttgtggagtcacacttaacccctttagattggaagactctttctaaggctaccctgtcaggaggagattttttgctttgggattctgaatggcgagacgccagtaaaaaaactgctgcttctaacgctcaggctggtaactcagactgggatagcaacatgcttttaggagagggcccttatgagggacagacaaatcagattgattttcccgttgcagtgtacgcgcaaattgcgacggccgcacgccgtgcttggggaaggttgccagtcaaaggagagattggtggaagtttagctagcattcggcagagttctgatgaaccatatcaggattttgtggacaggcttttgatttcagctagtagaattcttggaagtccggacacgggaagtcctttcgttatgcaattggcttatgagaatgctaatgcaatttgccgagctgcgattcaaccgcataagggaacgacagatttggcgggatatgtccgcctttgcgcagacatcgggccttcctgcgagaccttgcagggaacccacgcgcaggcaatgttctcaaggaaacgagggaaaaatgtatgctttaagtgtggaggtttagatcattttagaattgattgtcctcagaacaagggtgccgaggttagacaaacaggccgtggcccaggaatatgtccccggtgtggaaagggccgccactgggcgaaagattgtaagcataaaacgagggttttgagccgcccggtgccgggaaacgaggaaaggggtcagccccaggccccgagttactcaaagaagacagcttatggggctataaatctgctgcccagccaacaagatcagttcttgagcttgtcaggtcaaacccaggaannnnnnnnnnnnnnnnnnnnggtggctgccagagagattaattcgtcagataaacacagattctgactcttctggtaagtatcattctaaagactaaaattccttttgtgcttaaaattcagctgagagcaacagctctcaaagctgtttgtgttctccagctactctctgaaccagctcccgacaggaggccggagactagcctcagctttacaatttgcatttaaataaagtacctagacttccccgaaagaagttctgctttcctactttctcactgtctttcaagattttgtctttcaagcaggtaaatcaacattcccgaggcggaccagcggatgtgcatccccgcccccctagagcacacaggcggcagctgttacccccagtctcaggacatttccagcatgtggctttcagtctgagttaaaaatttaggtttacctagagggctagaagagtagatttttctatatcaataaagattggtttttattttggtagacaggcttagccccttagctgacctctggcttttcacccttgctgttactgcaaggtgtccttagctcaataggctgtggaaaaaacagggatgaggaggaacgacttccagctcctattttacccacaaatcgtggtgttattaacgacataattcttgcttaggctttgctaattctgaggttgataattctcctttaggagctgcacagcactcaaaactgtgcatactggtttgtgattgtacaaattcagtatgggcaccgcttggtgcagagatacttactgcaagggaaggtccagcttgaccatttctgagtttcctgtgagataaacccggtttaaaagaggttggtatcatattttggttaaaaataaaaaatattctccggctctaccttgcctccccaaaagataccgagagccacatgtgtgggttttacccacgggaagaatcgggtccatgtccacccaagccaaggttaaaagcccactcatctacggatgagaaaatcatttaatcacctcagttaagcgttgccttatttaacttaattaataggggggagagagattggagacgtactattgaaagggcaagcccttcactgcctcccacccaaataaaaaagccaattggccttgtactacaagagccggtcactccttctccctgtttcccacctatcttccaaaaatgcggagaaattcaacttagtgctattttcacatcgttcagtcaaacttagccagagttccaacgccctacttaaaattcaactagaaagttacctaccaagtactaattagcattataaagtcagagtctgcagctccaggcctttcagttgtttactagaaaggacagtcttaagccagatacagtttaccataagaaaggttaaagaatcccagtgaagcaagttttttctttagccctagattccaggcagaactattgagcatagataattttcccccctcaggccagctttttccttttttttttattttgttaataatagggaggagatgtagtctcccctcccccagcctgaaacctgcttgctcggggtggagcttcctgctcattcgttctgccacgcccactgctggaacctgcggagccacacccgtgcacctttctactggaccagagattattcggcgggaatcgggtcccctcccccttccttcataactagtgtcgcaacaataaaatttgagctttgatcagtatgaaattgccttagctccgtttcttcttttgccccgtctagattcctctcttacagctcgagcggccttctcagtcgaaccgttcacgttgcgagctgctggcggccgcaacacaggtagatcaccaaagaagcagcagatgtcaagtaagtgcatgcagtaacagtgcaggccatgcattatccaggggatgcacagggtgttcagccgcagcgctgcacaccagctggacaccaccaaaggctgggacaacagaactctcctccattgctagtgagaagacttcttatcagtgacttacgaaactaaacacaaccttaccctaagatcacagtcatgcgccgccttgtgatttactaaaaggaactgagaatatgtctacacaaaacctatacagctctttgaccacttcctcacaattgccaaaccctggaagcaaccaagatacctttaaataggtgaatggataaacttgtaagtccagagagtagaactgttactcagcactgaaaaaagctactaagccatggaaagagaatggaacaacctttagcatctatcactacataaaagaaggtagtgtgaagaatctgcatgccaagatttcagtggtgttttggaaaaggtaaaactgaagacagaagaagaacagtgaggggatggagagggctcagcagtcaagaggacttgttgctcttggggggaccttggttcaattccatatggtatggttcacaaccatccagaactctagttccagggactccagccctatcttcttccctctgcaggtaataggcacatatgtgttgcacttaacagttatggggaaaaaatatttctacatatatgttttaaaaaggccagtggtggtcaaaggttgaggagggaggagaatggataggtagaccacagctattccatgtgatattggaacaatggagatgagccagtgtatttgtctaaacccacagaaggtatagtaccaagagggaaacttacaatctagccctcatgggataaggttgggtgaaggttttcatcaactggagcaagtgtgccactcgggaggagatgctgaatctgtcagggtaacacatgttggtgaagtaggagacagaggaacatagctataccatctcagtttttatgcaaaattataaaactctgcaaaaattttatggctttaaaacaagtaactaccctggttttatatcaacctgacacaagtttgagttacttcagaagagggacttgaaactgagaaaatacctaaaattggcctataggttagtctgtcagactgtttcttaatcactggtatgagagggcccaggccagtgtgtgtggtaccgcttgtgggtaggtagtgttgggttgtataagaaagcaggctctgtaagccatggagagaaagacagtaagcagcaatcctccatggcctctacttaagatcctgccctgagaattaagctgaaataaagctctccttcccaagtttgttttggtcaaggtaccacagcaatagtaactgtaatgactatatttagtcagtttgactacatctggagtgaactacaatccagaaacggagggcaaatttttgcttggtttgaagtaggtgaatacacttctagtccagacctttaagatataaggaactgaatcttaagactgaagggcacaggcctttaatttgaatcttaagatgcaaatacatgcctttaatccaaaccttgatttgggaagacatacccttaaatatgggccataccttctgctagaaatctatataaggcagaaggaaactgttgctctttgcctacttgcccttgtcttgctaggacatccatcctttcactggcattggagcctacctctttgggattccagtatatacagaagaccagctaagacatccagccttgtgggactgagcaactactagattcttggactttccattcacagctagccattgttggattggctagactgcagcctataagctatttcagtaaatcccctaagtatctatctttaatttttttcaaaacctatttctaatgaaggttcttaaacaccttaacctctcttgtagttcactgtgactcaccaaaggtagtagaaaagaaaggatacaggggaggtggacctgtttagaattggttctttggagcaactcccatctgtgttatctggaaatcagcactttagttcacaggttagcagcggcagctagatccacttgcagacacttcatggatacaccagcagtccagttcaatagagtcaggatagcaaagaagaatcagtagctgtggcactacctagcagagacaaccagggctcagccttggcatgagtcagcagcaggagagaccagcaggaatgccaggagttgttcttggttatgcctctctcagggaatcaaagatcagcgaagactggagactaacaagcattgcacagcaagcactctataagcaagccaagctcagcttcctccactgtctgtaaagtcctttttataatccctccaaacatcacgtatcttctgcatgtcttgcctcagtacatgtgtctatctcagctgacatcactctgtcaatcagcccaagtctgaggaagtggcaacaaaagtagcagcacatcacctgatgttttttttgtttgtttgtttgttttttggttttttttttttttttttttggtgcacatggagtcctgacaaatgcagctcaactacaaaatgtaaggaggaccaataccaatacatgcttgttagtgacgaatccttcatgtgtcctttcatgtttgccttagcagaacatcctttctcccgtgtttgcttcagctaaacattccttcaggagtctgccttagcctttcacttgtgtccatttcagctaaatgttcctttatgtgtttgccccagcagaacactatccaactgactttccaaagaaccctaaagttaccacttcaatccatccatccatccatccatccatccatccatccatccttccttccatatctatggagagaggggatggagggagagattgactcattcctaagttctgtgactgtggagaactcttaatactgtaattttaccaataaacaccaaggcaataaaattaataactggcctttaaaaaataggaaccatttatatcttagagtcaactttgctataagacatctgaatatctgcttttaataagtacagatcataaaagggatttttatccacctgtgagacaaaagtttgatactttgattttgttactcaacaatttaagaaggcagtttgttctatcaagttctttattatcaaataattatacatgagaataagatttctattttcaaaaagatttccttaacatagtatcatattgtgagacacttggtggaatccagtgctacattttgttcagtttgtttctcttttgctacacaatggcttgttttggtctagaaactcatttctccatcacaatgctacccatgaaatgtgttcctttctatctagtatttactagtgcctggttaagaaaccaaagctagctacaagaaaaacctataatcaatcttatatagagagaccctcaatataaagaaaagcaaagggctttatgcaattacataaggcataggattccagaagtaacattcaaagttaatgttttattttcaacaatgccattatgagaagttaatgcagaaagtagaaaatcaaaagtagcccttgggcctttgacaacgtagttgctaaggcattttatgaatgctaatatgctctaaattagctactgtttctcagaattacaaactaaaagaatatgaatatcagtaattacagacttctaattttgtttattccttttccaaccttctagctgttcttggggcacccttatgatggacagtgaattaactgagtgccttttatatataaggcactatgttagaggctaaaaatgtgggcatgacagcattccttgtataactatgtatcagccagctgaatactgaaccatttctccagattagcaaactatcaattccccacagatatctaccataggtgactcaaaggaagaaatggtaactataatgtttattttttagatgatacttcttctttctcaacttcaacctcttccaaaacctcccaactttccaaaaaagacaactagccaacaaaagtgacaacaaaacaaaaagcacacacacacacacacacacacaaaacagagccaagaaagctgttagcgagttactcataagcattgggcctaccctgaaagaacaggacacacaggtatgaaatcagagactgacagcatgtaagagacctgtacaagctcataccagacagatccctggtcagagaaaggaggtgaacacagtccccaccaacctacccacaaagctatttacagttggcacgtgctgggagagggagactccccacaagagtggcactggtacactttcagcttctatgtggtatatcatacccagttggagccctcagtgcctgctactgtaaatctcggggtaggcagatagagagaactgactacagccttttgacagaagacaagaatctggccagatgtagttctcatcaacactgttagttacagagaagttgttcgtcaatggctttttttggtaattactatttattcatttatttatttatctttgctggggtgaaatgggaaggcttaagcattcttttccacattcaggatcagttcttaaaggctccaactctgctggctttgctgataaagttctttagaagatcgtggtccatttctgcaaagcctgacgtttgtgttactacagtcagatggttgatgcagaacctgaagcagaactcttctaagtcctaggaacaataacaacagcttgatgagtttatattcccagtgcagcccaacaaggcaagagaatttctctcagaaaaaggatcagatgaccagaaggagggaatgttagcgtgatacagctacagcaattattaacaattagtccatgtttctgaaagtgtacataacacaagagtccaatgcagccaggccaaacgcctagccttttcctccaaaagaggaacctaagctaggcatcctcca

SEQ ID NO: 1085 - DNA, 4355 bp, Mus musculus
gcttgagtttgaagaaattgaagaacccgaatttattgcattatgtcaaaagttaaaggtacccgatcatgtcagagaaagagcttggctaacttgggagaaagtttcatccgtggatggaatcctggaaggatatattcaaaagaagaaggaactctggggcatctgcatctttatcgcagcagttgatctagatgagatgccattcacttttactgagctacagaaaagcatagaaaccagtgtctataaattctttgacttattaaaagaaatcgataccagtaccaaggttgataatgctatgtcaagactattgaagaagtataatgtgttatgtgcactctacagcaaattagaacggacgtgtgaacttatatatttgacacaacccagcagtgcgttatctactgaaataaattctatgttggtgctaaaaatttcttggatcacttttttactagctaaaggagaagtattacagatggaagatgacctggtaatctcatttcagctaatgttgtgtgtagttgactattttattaagttctcacctcctgcactactcagagagccatacaaaacagctgcaatccccattaatggttcacctcgaacacccagaagaggtcagaacaggagcgctcggatagcaaaacaactagaaaatgatacgaggattatcgaggttctctgtaaagaacacgagtgtaatatagatgaggtgaaaaatgtttatttcaaaaattttatcccttttataaattcacttggaattgtatcatctaatggacttccagaggttgaaagtctttctaaacgctatgaagaagtttatcttaaaaacaaagatttagatgcaagactgtttttggatcatgataaaacacttcagactgatcctatagacagttttgaaacagagagaacgccacgaaaaaacaaccctgatgaagaggcaaacgtggttactccacacactccagttaggactgttatgaatactattcaacaattaatggtgattttaaattctgcaagtgatcagccatcagaaaatctgatttcctacttcaataattgcacagtgaatccaaaagaaaatatcctaaagagagtaaaggatgttgggcacatctttaaagagaagtttgctaacgctgtgggccagggctgtgttgacatcggagtacagcgatataaacttggagtccgattgtattaccgtgtgatggaatccatgcttaaatcagaagaagaacgtttgtccattcagaattttagcaaactcctaaatgacaacatctttcatatgtctttactggcctgtgctcttgaagttgtaatggctacgtatagcagaagtacattgcagcatcttgattctggaacagatttgtccttcccgtggattctgaacgtacttaatttaaaagcctttgatttttacaaagtgattgaaagttttatcaaagtggaagccaacttgacaagagaaatgataaaacatttagaaagatgtgagcatcgaatcatggaatcccttgcatggctttcagattcacctttatttgatctcattaagcagtccaaggatggagaaggacctgataaccttgaacctgcttgtcctctcagcctgcctctccagggtaaccatactgcagcagatatgtatctttctcctctaagatctccaaagaaaagaacttccactacacgtgtaaattctgctgcaaatacagagacacaagcagcctcagccttccatactcagaagccattgaaatctacctcccttgccctgttttacaaaaaagtgtaccgtctagcatatctccgactaaatacactctgtgcacgccttctgtctgaccacccagagctagagcacatcatctggactctgtttcagcatacattgcaaaatgagtatgagctcatgagagaccgacatttggaccagattatgatgtgctctatgtatggcatctgcaaggtgaagaacatcgacctcaagttcaaaatcatcgtcactgcctacaaggatcttcctcacgctgcccaggagacctttaaacgtgttttgatcagagaagaggagtttgattccattatagtattctataactccgttttcatgcagagactaaaaacaaatattttacagtatgcctccaccaggcctcctaccttgtcaccaatacctcacattcctcgaagcccttacaagttttctagttcacccttacggattcctggaggtaacatctatatatcacccctaaagagtccttataaaatttcagaaggtctgccaacacccacaaaaatgactccgagatcaagaatcttggtctcaattggtgaatcatttgggacatctgaaaagttccagaaaataaaccagatggtgtgtaatagtgacagagtgctcaaaagaagtgctgaaggcggcaacccccccaaaccactgaaaaagctgcgctttgacatcgagggagccgatgaagcagatgggagtaaacatctcccagcggagtccaaattccaacagaaactggcagaaatgacttccactcgaacacgaatgcaaaagcagagaatgaatgagagcaaggatgtctcaaacaaggaggaaaagtgaggacctcagggccctggaccctcagccctggggacaccagactcctggctcatggttgtgactagttcccaggttctgctcatgttagagatataaaatgtgcaggtacaagctgaatatttgtgtgggtgattcgtaagccacttcaatgttgtaatcaatggtagagaattgatagcacacaggattgagaatcttgtgcagatcatgccatttaaaatatgaaagcaagttgtttgcatttccaacatgagcctgctgccctcagaagtgagggcctctgcaggggtcctgaccccctacatctggctgactactttgcctttcctcatggcacatgtgtgatgtttgctcttggttttattaatttatatgtattttttaatttaacgtgaatacccttagaaaatgtgtcttgtcttccaaatgcaagttgattgactgtccacattcaaccaaattatcttgaatcttctactgaaacagattgttacaaactgggaaaaagtactaatttctacacattggactattttaatattagaatctaatgtgccgtgtgtttgtttcacatattttacttttgaaatacaagcaaaaaaagtataatcatatgatactgtcttactactgacacagatttcatacctcagaccctctaagaaccgattcttttattcacccaacacatgctttgaactgaagactattgataatactccgaggttgtttttttctttcaatcattcagatcactgaatttataagtacccatgtagtacttgaaagtcaagtttggccacaactgtgcttaagaggaccctagtacagtacaacccaagtgcactttttaatgtttctgggtcctgaagaatcaagatacaaattaattgtgatttacaagcagactgttaactatagaagccttcagtttttttccctcatagacgtgtctaattacatctcaacagtttactctgttcttctacatctggggatgtttgtgttctctctggaatggtacatcttccagggtcttttgaacttgcagttatctattttttaagccaatctggtctaataactctggcttcttcaaagccacaccatttctagtccagctgtgcagaaacttcagatgaaaacagctgcattgaaaatagaggcactcccttcaccccccacctaaaggtgtatttaaattatcttgtgggattaacttatttagagatggtataatttaaaataggggatatttaaggtagcatcagctagcatttaagaaaatcactttttctaaactccatactttttgaaaagaaatctggtcttgttaggaaacaaatttctattttgtcctcaatttagtttcagttttactagtttgatagttatctcaataacaaaagcaatagacagcttcccccatttcttcattaagttttgcatgatcatcacacagattagttaggttttaggtcaagggcttaccatacttctaggtcttttgctagtgagttcaagttagaattagtgacagaatcataggaattttcagagatcctgcttcgagatttcttaaagctgcagacactgcactattggttttgtttttttgtaccggttgaaactatacattcaaattgctatgttcctattttctataatagtttgtctattttaaaataaactagttgttcagagcctt

SEQ ID NO: 1086 - protein, 875 aa, Mus musculus
LEFEEIEEPEFIALCQKLKVPDHVRERAWLTWEKVSSVDGIGYIQKKKELWGICIFIAAVDLDEMPFTFTELQKSIETSVYKFFDLLKEIDTSTKVDNAMSRLLKKYNVLCAKKLERTCELIYLTQPSSALSTEINSMLVLKISWITFLLAKGEVLQMEDDLVISFQLMLCVVDYFIKFSPPALLREPYKTAAIPINGSPRTPRRGQNRSARIAKQLENDTRIIEVLCKEHECNIDEVKNVYFKNFIPFINSLGIVSSNGLPEVESLSKRYEEVYLKNKDLDARLFLDHDKTLQTDPIDSFETERTPRKNNPDEEANVVTPHTPVRTVMNTIQQLMVILNSASDQPSENLISYFNNCTVNPKENILKRVKDVGHIFKEKFANAVGQGCVDIGVQRYKLGVRLYYRVMESMLKSEEERLSIQNFSKLLNDNIFHMSLLACALEVVMATYSRSTLQHLDSGTDLSFPWILNVLNLKAFDFYKVIESFIKVEANLTREMIKHLERCEHRIMESLAWLSDSPLFDLIKQSKDGEGPDNLEPACPLSLPLQGNHTAADMYLSPLRSPKKRTSTTRVNSAANTETQAASAFHTQKPLKSTSLALFYKKVYRLAYLRLNTLCARLLSDHPELEHIIWTLFQHTLQNEYELMRDRHLDQIMMCSMYGICKVKNIDLKFKIIVTAYKDLPHAAQETFKRVLIREEEFDSIIVFYNSVFMQRLKTNILQYASWPTLSPIPHIPRSPYKFSSSPLRIPGGNIYISPLKSPYKISEGLPTPTKMTPRSRILVSIGESFGTSEKFQKINQMVCNSDRVLKRSAEGGNPPKPLKKLRFDIEGADEADGSKHLPAESKFQQKLAEMTSTRTRMQKQRMNESKDVSNKEEK

SEQ ID NO: 1087 - DNA, 198138 bp, Homo sapiens
aaattggcaaatattaaaatgtccttccccaccaccctctcccctgagaactggttgttaaatttctttccagtacattacagagtcaggggtaacatagaagattcaatattctcaggctcatctatccaaatgccctatcctaggtcttagggtaatactctttttcctttcaagaacaagatgtgggctaggagaccctgaaagtccatgcatttggttgccttttcaactcttctgcccttacaatcagcttccgtgacttcctgtagcctaaagcaaactacactaaatattactaaaaattgccagtagaggccctctggccttcacggtgtgacttaaggtgacaggtggctgccctgaggcatcattttgttttacaaggtatacaattccatcaacagaatcaagcccctctatagtccttacagttattgtccccacactgttcaaacagtatggctactacctatcccaatgccccaccttctatctgcactgcatctcaattagctacaggtgggaagcctttgtaatcatggtatcactgtgttgcttcataactacccactcactgtgccatgggtctttattgccacacggtcggtaagtaacccaactctagcattccatcctgagtgtctgcaggacgctcctggtgccaagtcttttagcctgggttctgtagaaaacagagcctgagtgtagtttgagagaaactggagtgaagacgaacgggctgggcaaagaaggaagagaaactattaataataaaatagtgtattaccgaactagctacctcttggtatcaagcccgggtgattggtcagtatcatgagggtcatattttgagaggtagtatggactactgtgtttcaggacaatctgtctgggtggaggaaggagaggagtttatatgctggacccatcttgttttgattagatttaccccaaggacattaactccactgcacttacggctacactttgttagaagcccaacagttaggcactatctcagccctcttggggtgggaggtgagatgtgtgtggcttggggaaagggaggggaaccactgggatgtgccaatgtaaagtctgttgcttcagtagtctctgggcagggcccatacagttggttgctatggtggcagttggggaaaacaagtggtcaatgaccctggagttaggccaggctgtttggcttataggtgacatatacactgcttgatatgtctaccacactgcccttcttgaatcttggttttcggcatttctttaattctatttagtgttcttccaataaattctcattttttggttgctaatcagagccgatttctgtttcatgaggccaaggaaacaattttaagcaatattttatactctctttagtgctccaaacactgttgtatacttatttggtgctaatgctcgatgaactgcagaaatttgtctatgtactgtaccacttatctatcgctgtataacaaattgcccccaaattaatgactaaagcaataatgattcactggttcttctgctgatcttctctggtaggtgggtgggtataggctcagcctctttctccatgtggtctgtcatcttcatagggactaacccacacttcttacatggcacctggatttcaggacagcaagccctaatgcacaagcacttatcaaggtgcttgctgagatcctattggccaaacaagtcacaaggccaagcccagcatcagtgtggaactctgcacaaaggcatgaatgtcagtaggtgtgattcattgtaggccatcagtgttagtctaccaccaggtatttacattgttctttagagcagagacttccggtggtcccccaacagctgttctcccttgcttctgtattaagagatccctgaattctgttaatgaactcatgattgtcaaaaaaagttttttttccctgtaccccacagtaaggtgtggctttgcatccacgttttgatcaatgggatgtaagcgaaggtgtattgtggcagtttccaggaattttccttaagtgagaacaggcgtgtgcctctggctttttctttatgccttccagcaccctgctgtttaaaacgtaggtacgacttttggctgccatcctggacccttaagtaccctccagggatgatagagttatgagctgaaggtgcctgtgtccctgaggacttcactgagcagaaccttcacttagtcctagaattcctacctctagacttttacctgggatactaatcttttatttaatctattgttattttgggttctgttattagcagctaacataatcctgtcatactattgaaatatagtctctctatgtttttaggtcatactcgacagtatgtaatttttttttttttttgagacagagtctcactctgttgcccaggctggagtccagtggcgtgatctcagctcactgcaaactccacttcctgggttcaggtgattctcttgccttagcctcctgagtggctgggactacaggcatgagccatcacgcctgggtaatttttgtatttttagtacagataggatttcgccatgttggccaggctggtcttgaactcctggcctcaagcgatctgcatgccttggtctctcaaagtgctggggttacagatgtgagtcaccaaacctggcccacagtatgtaatttcttaccttccgctcatcttcacccaaaacattctgatagcccttattgattagaagaggaggagaatgcattaagtttagttggcagaaattgtgtgaatttaaaatcagtgcatttagagaaacatgtgtggctcatcaagccattaagaaaacaaaaaagaggaaactacaaaatgtttgcattcctgtagcccacaagagacaaatctagaacaatgctggggtctggtcaagtagggaaagctctcagtaagaccaagcacaaaccccacttctggtttccttggtttggggctgtctcatgttaatgatatttttcatgagaaaaaccacatgcaaatgaaacaattcgttgtccccacttggaggtgcagtggtggtggtggggagaactagggaagggtttgtgcatcagacaaaggttgggattacaagggttgtagatgaacgagatgtgcctttagttacagccacttcttgagtgctgtatgtctatgtgactcctgatgacttggtcaaagaaaatatcaacacattgccttagctgttttccttgatggggagaaatcgacacacttggaaatggaagaatttcctctcttgttgcagtggctttgtgcattggcttgagctgcagtcatctggcagtttgttgcttcagtcactggccctggcccttgccactgccaggcagagttgagcctgcactgaagacatgagaatactggatcaatacaaacgttatggaaaatgttttaactttttctttttttaaaaggcctgcctgttatctttatacctctgttacccgccccaccaccccagaaatgagccagagcctttgtgatggctagatttgtttgaacatttaatctccttccccatctgttttgagaaatatctagcctctttatcagaagagagcttaaagtctcaccaacattcttgccccaggtgtcatgggctgaactgtttccctcaaatttatattttgaagtcttaactcccagtacctcagaatgaaactgcatttggagatagggtctttacggaggtaattaagttaaaatgaggttgttagagtcattcattggaaaagtatttgtcaaatgtctactatgtgccaggcacatgttaggcatgcagccccactggttaggagaacagatatagacctaccttcagagactgtctggcttcgtggacatgtagcctgtgtagtcacttagttctccatgttagaaagaccctgtggttggtttaatgctctgttgccaccatcttgaaattcttagtaatttttcaatgaggagttctgcattttttttcctctggaccctgcaaattatgtaattggtcctgctcatggaaattggtatagtaggagaatcaatcatattctctgcacttaggagtgtggtttggtggcatggagagaaggtcagtgtagcagaagtagtacagtataaaaagatgaagatgataatattcacaatggcgggaaggagtggagtctgctgctgggggatgaaaagatacatgagtggaacagcaggggttcttttttgttttctttacttttcctcccagaccttattattaaccttgaataattcagataaactgaacaggtctctgttccttgaaacctgaaagaatctaacatgcacatatgggaagttatttaagtcatgggattgaaatagagcaagaagagaggaggattgaagacgcttgaagaccagtgtttcccacactatctgtgaaggaacttttcattctttttcattaactgtttgtcatgaagtgatattaacactttggaatgtaaaatagaaacaaattgcaaaaaattataatgaaaacagaggcacaccaaatattgtacaagctcacattttttagattaaacagaaatagaattacatttcaataaaaattatcagaacaaacataaataaaagaaaaaattacaaaatgtacattgcttattgaaagtgtccagatagataattaataaagagaattgccattatcctcctaatatttatcacctcacagccgtaacaactaacaaaaagttgggagtgaagtagtaatttcccactaaacaacatgaatgttaatatttgaagttttaatgtgagaaatgagtgggctctttgcttgttaaattatctaatctaggttggattggtgacatgctacttgcaggagatgatgtatatctaaattgtttttatattttattttaacaacactagtagtagaaaaactagtctctcaaaaatatgttgaagggaacagaagaagacttaaagcaatttaacaatatcaggataatcacttttaacttttatccttaatgatggaaacaatgcgttattttcaaaattcatcttcaatctttcatcagtagccagtttcaaaaactgtcactcaagttatctttcaatgaaataaacggattttggatccatgaatttcttgcatgtggagcttgttttgatagaaaatactcagatattttatcaaatttataattagttttttaatattttgtatataaatgtcctttaagtttgatggctttattgtttcattagtctgtaatgattttagcacttcactatgagttatggctacaaactcaataacaagggattatacttctgagtaaaattagtacaaactcctatttgtttaattctttggaattacttctctgatcattatttagtttactactgtgattactaacacattactgatgtgtgtcttgtattggcaaaattggacagtaaggattgttttgccatctataatttagggttaaaaacaaatgacacaaattttactcccctaatttagctaagaatttacaaaaaataggcttgattaaaaatgaaaatgattgtaaaaataacaagttatataagtaaataaatatttacattttcatagatttttactcttgggttgcaggtgacaaaccttgaaattttactcattgtaatatcgtactattgcatatgacagggacacaaccatgccacctgcaactcaagaaccaggttgaagaatacctgaactgtttaacaagcaatgtccaatgatcatgcactcggatattcctgaaatgtcaaattgatataaacactgctaagcacttatccttttaatttctgtacttatttccttgtggactaaacacaaacagttcgcagactgtcactggtccaagaactacactttgagtagcattactctagggaacacttgcattgaagggaccggcagaaagagaactaatgaaggaatttgtgaagtaacaagggaggagaacaaggagaccatagatttgtggaagactagggaatttttaagaggaagtggttaactatattgactgcaagaaaggtcaagtaggttgaggaccaaaagaagccatgggattgacaactatcatcagtgacatttgaaagagtgatttcagaagggggctcttggtggtagtgaaagaaagccaggggccagcaggctgagaaattggggaagcagagagaaccaatggggactacccttctaagaagctagatggttaagaaatggaaatagtgtggtagcttgggggtataaaaactttgaaggaaggctttttagaacgatgaagactttttagacccttccccaaattttaatatcactgaaggagtctcaaactgaagagagttccctctctagatagaaaatctaagaaatacatatattttttgtaggagtcttacagcaatcttcttaaaattaccaagcaggttggaagagatccatgaatttcaagaagttcagggggaatttttttaagactctgctgaaatatatatatatatatatatatatatatatatatatattttttgagatggggtcttgctcttgtcgcctaggctggagtgcagtggcatgatctcagctcactgcaacctctgcctcctgggttcaagtgattctcctgcctcagcctccagagtagctgggattacaggcacctgccaccacactcagctaatttcgtatttttggtagagatgtggtttcaccatgtttgccagcctggtctcaaactcctgacctcaggtgatccacccgccttggcctcccaaagtgctgggattacaggcgtgagccaccgtacctggtctagactctgctgaaattctaatacttctttggtaatgcaacagaaaactaaagattttgatggtgaactcaattgcttctgagttgtgtggatgaaaatatattttattattttttccttcaacttttaagctcccaggtatatgtgtaggatgtgcaggtttgttacacaggtaaatgtgtgctatggtggtgtgctgcacagatcaacccatcaccatggtattaagcccagcatccattagctctcctgatgctctccctctccccacccttccccgctacaggccccagtgtgtgttgttccccttcctgggtctattttatggtatgtatgtgtgtatgtgtgtgtgtgtgtgtgtgtgtgtgtgtgtgtgtatctatttatgtgtatatattatgatatatacaccacacttttttcaaactattattttaggtttagggatacatgtgcaagtttgttatataggtaaactgtgtgtctctggggtttggtgtgtacagattttttcaccacccaggtaacaagtgtagtacctgataggtagttttttgatcttctgtcctctcaccctacaccctcaagtaatcccccagtgtgtgttgttcccctcttcatgtccatgtgttctcattgtttagctcccacttataagtgagaacatgcagtgtttggttttctgttcctgcgttagtttgctgaggataaaggcttctggctccatccatgttcctgcaaaggacatgatctcattcctttttatggctgcaggaaaatatattttacatactagtgaacatagttaaattaatccatggtcaagacatatattcttttgtaaattgagaaatctctttatcataattgtaatatggtaataaataaatctagattacataaatgtaatctagatgttgataaactggttttaaataaagcaagtgatatctacgtatgaagagagtttacttcagttcctagaactttccttcactttcctgccatccctacttttagtaagcaagcatttactgtgtgtgtaacactgtgctaggtactaaggcaatgatgatacccaagatttggtctctatcctgaagataagcacaggagaaacattatcagtcatgatgctttctgttgcaaacaagtgaaaacctcagctcagcttaggtcagctccagggctggccaaatcagaggctcatttataacactgaggatccagattcttttgaaattcctcctgcaccaatatcagcatttctaccttctctgtaggttggcttgcctcacgttacaatggctgcagcaatcagaagtgtcacatcctcagtaatacttaatattattactattatttaataatatttagaactgtgccatccctgtttcaatttatcaggctcccagcagactactccttatctttcaaatgtcaaaactgcatcctgagctcttgcctaaactaatctggggtgaggtgaatggaagtagcactttaattgtattcattctttgtagctggacctgggcctgggccctatctcctgacatttgcccacaagaaagatttctgaagttaggtaggactggctgttgagtaggccagtgcttgccaaacctttacacatcctcacatatgtcataatatgcagataaaaagataatcccttatacaacttgctgggataaactcaggaggcttacagccatgacctgcttgaaggttcttcctgccttagaccttgctcagctgctccaggatgaggggatttacatcacagcacaactgtattttattcacagcataaaccatctctttccttctcagttgacgagttcagatgggcaataacagtgtctgccaaagagaaaaaaaaatgtattcaaactagataatctattggtacaaataccgagacacagaagtgataacagctttaagccaatgtttgatggtggtagtcccagcaagctcttttctgatgtctttgtgcctttgcacatgctccttctctgtcactgttttcttcatcaaacataatataatggacaagtggaatcaaatagaattgagttcaaattctctgctacccatcggccctggtattggacaaattaactcctctgagcctgtttcctcatctgcaacgtagactagctaatactacccattggaaagcgttgtttcttagctaatgcatgcaaggcttaaaacctagatgacgggttgataggtgcagcaaacctccatggcatacgtatgcctatgtaacaaacctacacgttctgcacttgtatcccggaacttaaagtaaaaaaaaaaaaaaaaaaaaaaagaaagaaagaaaaagaaaaaaaaggctgtttctggggattaaataagacaattatgtaaggtggccagcacagttcctggtacatagtaaatgtcaggcctgcctgacagacttctattcagcagctactgctcccctgaaaatcttcctcagacgtttccacggtgcttcccgttcttacaccactacaatcctttattacactactatccgttcattccccacagctccctcccttcctttccctaaccagtgatcccaaaaggccagcaagtgtctaacattttctatcttctaagtgactggtaaagttccgcacctatcagcgctccaagtttgtttttgttttggccgactttgcaaaacggattgggcgggatgagaggtggggggcgccgcccaaggagggagagtggcgctcccgccgagggtgcactagccagatattccctgcggggcccgagagtcttccctatcagaccccgggatagggatgaggcccacagtcacccaccagactctttgtatagccccgttaagtgcaccccggcctggagggggtggttctgggtagaagcacgtccgggccgcgccggatgcctcctggaaggcgcctggacccacgccaggtttcccagtttaattcctcatgacttagcgtcccagcccgcgcaccgaccagcgccccagttccccacagacgccggcgggcccgggagcctcgcggacgtgacgccgcgggcggaagtgacgttttcccgcggttggacgcggcgctcagttgccgggcgggggagggcgcgtccggtttttctcaggggacgttgaaattatttttgtaacgggagtcgggagaggacggggcgtgccccgacgtgcgcgcgcgtcgtcctccccggcgctcctccacagctcgctggctcccgccgcggaaaggcgtcatgccgcccaaaaccccccgaaaaacggccgccaccgccgccgctgccgccgcggaacccccggcaccgccgccgccgccccctcctgaggaggacccagagcaggacagcggcccggaggacctgcctctcgtcaggtgagcgagcagagccgccgtcgcctcacgcgggaagggcgccccgggtgtgcgtagggcgggcgccaaggcggctcggcggggacccgtcctcgccaggggccgggtcccggcgggaggaggcgccctccctgccccccgccacggcggagcgtctgcagaatggtgacaggattctgggttcttgggcgaggggtctcggcttcaacttgacaggtgtcgggcgggtggggctagggtcctgagcgaagtgacaggtgcagttccctcttgtgaggctcggaggcagagggtcgttgcgagcgtccatcagacgcaaaaaatgaaaaataaaaatacaaaaatggtgtctgtgggagagtttttcaccggagaattggagtactccggtggtcgtctgactttctgttttggttcacgcgatgcaacagttgggaagtattttcttccgggcgtgcactgcatctgaagtccatttgtgggagaggccgaccagaaagccttggacaagaagcgcagggtcctgagtgtccattgcccacaggatactcggctcaggagctttgcggcgtttccttagaacaataatgcatcgaggccttggggactcaaagccatctgtagtgattgatggagcgtaactctttagaggaactgaaacatgggcaaaactttcatgagacatttaccagaagtgcttgaaagtttctaaacttttttttttcctgtttgatgaactcttcttgcgtgttagtcggcttcggcttgtctcattatttcttccattttgccttttgactttgaaccagcaaggatcttggtgtcccctctttttgcctttgtttttggcacaaaattagtggttctgtgcgcaaatggaaattttcgttttcccttattaagtggaatctaaatttaagcaagtccatacgaatgcactagatcttgaagggaagtatttattgtattacaacatcttacttttcttgatttttctactttatggttaaatagctatgattgaaagagtgtaattgtcattattgtcagcactggttctactttgagacaagttcattgcagagggaatgggacttgtttctgtttttcactattttctctcccattcttgtctatcaccaaatcctttcaccctcacccatttctttccactcggtatacactaacaattcacggcagaaaagattgaagtgggatttaggaaatggcccctggaaggctattaaaaatttatatatttaaatggactgtcttataggtcagttaaaaaccatattcgttaaaaaaccaaaataacaacaacaaaaaattaaaaaccacgtctggggcatgttctgggaaaagacatggctttagtttctgattaaattctgatgtatccaattcttgcaaatttcccttgggaaaatgcagtaatggctactctaaagaattccatgttatgcacacagctttggaagcatactctaatgtagggtaaccaggaatattgacgttgtggccactgcttggaaaaaagaggactgtttctttcattttttaactcattttatatattttaagtaatggaactataaaaaattctcttataagtcaaaaccatacaagatacagtctgttcttgattatccatacccacaaagggtttcattaacatagacagttgaactctataaattaaccagcaagggtagaaccactgccgtgcagtctgatactgagcatcttgcctggagatggaatcaaggctcagtccaactgcacctccagtgacagattccattcctgatttgagagtttagatcttatttctgttgccttatctctggcctaagtaatgtagctggaagggaaactgtcactaggaacagcataccacattcattgttgaaataatcaaaggttaatcatgtttcgagctgggtgtgatggcgcgtacctgtagtccatgctactcaggaggctgaggcaggaggatcacatgagcttgggagttggaggccagcctgggcaacaaagcaagaccccagtctttaaaaaaacaaaaaagctgaccaggcatgttggctcacgcctgtaatgccagcactttgggaggccaagatgggaagattgcttgaggccaggagtttgagaggagcctgggcaacaaaacaagaccctgtctctaaaacaaattttaaaaaattagccagtggctgtggcacacctgtaggctcatctactcaggaggctgaggtgggaggatcccttgagcccaggagtttgagactgcagtgagccatgatttcaccactgcaccccagcctggatgacagagtgaaaccctatttcaaaacaagaaaaaaaaacaaaaactaattatgttttgaaggaggaattggcagtctagaatagtggtcaagggcatggattatagagttagactgttgggctcacatagtggtttacctcttaccggctgagacctcaggtaagttctttaacttctccaatttgacagacatctgtaaatgtctacttttacagatgagaatacttatctaaaagggctgatgtcgggattcagtgaaaccatatgtttaaggtactttctacaggatcatagtaaatactcaaaaattattaattattcttcatactattcttattagtagataacacatagaaattagatgaatgaaaatgaattagccaacaagaatttattaaatgcttgtctttgttaaggggaaaggacaaaaataagcagtcgcatcatgtaagatgtgctagtaggtagagagatatatgaaacattgataagagaagactacagtttaacaaagtcactggcgttgaattgtataatattatctatgggtttttatctttttgttgttatctttatcctattttcccaaacagctttagctattacatttactttccttcacagaagtgttttgctgctttgaagtatatttgacttaccatgcaagcaaatatttttcactgtgtggtatccttattttggaatgaccatgaaaaagataatcatatgtttaaatttgaagtgtaatgtttttctaagataaaataagatcttaaagtatttaataatgttctttttcacagtagtgttatgtgcaaactattgaaacaagtatgtactgaatcaatttgatttataagtatatgccaattatatgattattttcatttggtaggcttgagtttgaagaaacagaagaacctgattttactgcattatgtcagaaattaaagataccagatcatgtcagagagagagcttggttaacttgggagaaagtttcatctgtggatggagtattggtaaggattttcttaaaacgttttgaaatttttttttctcattttaaaaacaacttcaaatcactatacaaaaattgaaagatagaaaaatataaagacaataaaagctaataataattccattacccagaggaaatttacctctgctaacattaaaaatgtttgaggccgggcacggtggttcatgcctgtaatcctaccactttgggaggctgaggcaggtggattgcctgagctcaggagttcgagaccagcctgggcaacatggtgaaaccctgtctctactaaaatacaaaaaaaaaaaaaaaaaattagcagggtgtggcgtgcgcctgtagtcccagctatttgggaagctgaggcaggagaattgcttgaacccaggaggtggaggttacagtgagccgagatcgtgccactgcactccagcctggcaacagagcgagagtctgtctcaaaaaaaaaaaaagtttgaaaaaaatccctccataaatgcctcccaccaaactattttaaagcaggtcttagttatattttattcactatgatacaaggacttttaaaaaaacaccgccataccttataaaataatttttataccttctaatatgcaatcagtgttcagatttcctgactgactcagaattagttttgttagaattcaggatcttgaaaatatattgatatattcctttcattttttctttgcgtaagtatagatgtatatgtttaataaaaggagcaaataattactagagttttatatgtactggggcaatagtataagaattttacatagccgggcatggtggtgtgtgcctgtagtcccagctacttgggaggctgaggtgggacgatcacttgaacctgggaggtggaggttacagtaagccaagatcgcaccactgcactccagcctgggcaacacaggaagaccctgttgcaaaaaaaaataaataaaaataaggctgggcgtggtggctcaaacctgtaatcccagcactttgggaggcccaggcaggtgatcacttgaggtcaggagttctagaccagcctggccaacatggtgaaaccccatctctactaaaaatacaaaaattagccaggcatggtagcagatgcctgtaatctcagctacttgggagggtgaggcaggagaattgcttgaacctgggaggcagagtttgcagtgagccgtgatcatgccactgcactccagactaggcaacagagaagactccatctcaaaaaaaaaacaaaaaaaaccccagaactttacaaatctacgaataactcatttaaaaatcattgagatatgaaatataaaatctttttttatgtgtaaaatgtgaaatgttcatttaacagatgaagacactgagtagagtgaggttgagtaacttgaccaaggtccctaggaaataagatctcaaatataaatttgagattatacatgtagttatgtatagttacatgtagttacacatagttttgtattttcctgtttttttctcatatgagcattttcttattaaagtttttttgtaatatagtttctagtgatagtataatattttagctagtggatgtattttaatttgttaactcttactggatatttgggttttttccaactttttgatgctataaaataatgtaataaacatttgtattcgtaagaataatgcctggcacaaagtgagtccttgataacttgttaaataaattaatgaatgaatctctgattattttattagaataaattcttataagttgaattactaaatcaaaagctatgaacatttttatgactcttgatgattattgctagattacacttcagacagatacttttaatgaatttactttctcaacatagtagtataagagtatatatctgtttttactgatctgattaacacagcggaatgtgtttatgtatgtcccataagaaaattgtttaaaaccattaaataaaatctctggcagtaaaaaggagaaaacaagtgtcatgatttccaaagaattgaacatagtctcacatttcttatgtaaaaagagaggaatactgaagtatcttgaatgtatgacttgggtattataatccccaggcatctaatgtatattttaactgacttgggtacctcatgtacaaagctgtttttgtgcatatacaattaaatgggatcagagctccttcacttttctcttcctaaaatactagatttttagtgttcagaaattttggaagggatagctgattataaagagcattagtgaatatacatactgtagttttcaatttataagtgcattgtgttccaaatctgtttgcaagtttgatatagtagttaggtttccagcctagttcacataacttatttttttttgtactaaactataacaataatagttttaacagtagaggctcttttgagcttcagaattgaatacatatataagcaaatgttactgctttattaccctttttcatcctggctttgtctctaccttccctgggaactggcccagtttgaatcttatttcctaatggagctcataatggggactaggatgtgtgaaattatttatggctaggtactggaggaaggtaagaaaggaatttcatgttatttttgggatttgaggtgtgcttttgaagggtatgatggaagatgatgtcctgttgtcctgttgtaaatcaacagacttttccttgaaatatgattttaagttagagttacgtttttgaggtttggcctgagaatttaaccttcatttatataataatatctaagggagaatgtgatacagtgtgttctaagaagcaaatgtaatgacagaataaatgtgtttccagtgcagctattctagtggcagttgtctctcttctttgaaacaagaggaggaatattgtcaaaaaggaaaccctttttaacaatagaaagtaggtgatgtttattgggatagaggatgggttaagagcaaggattaagagtcaaacagatataccatgtccgaactccattatcttgaacatgttatctacaattttcaagccttagttttcttacctgtaaaagggactgacagtaatttctggatcttggagttatgtgcagattaaataaattaatgcatataaagctcttattagagtcaatgagtatgtatattaggtcttgcaaacagaataattttacttaagaaataccccagaaaattttatcattgatgtatttttttttaggagaacttaggatatcagttaaaatggttacaattttaaatgcattgtagtgattttgatgtagtaatgtttgttaaaattcttatttttaagtactttagcatcagaaaagttgtttatgcatacatgaaagcatatattaatccctttaaaggaaaagtttgtggtattttgtctagaaaagtgttttctttttttaaaataaatatttagtaaagtgtaataataaagattagctttgttcataaggttagattgtatttatgctgattatagcatatgaataggactttccattaagaaattggctaaggtgatgttcatattgtgacttaaggtgaatcagctgttagaattttggtttactttctgcatcttgattggtagtatggtagaatggaaaatgccttggacctcaaggcaggaaactttggttgtaattatattgtagctatatgattttaggcaaattggttaattctgtgagtctcagtttgctcacctgtaaggcagaaataatgcctgaatgtgaacctcataggctttttgttatacatacatatatatgtatatgaaatgtatgatatacatatctcaaagagctttgggatatattgctcttgatagaaccacttacttatttttgtgatatggtggttatattttaaataaatacagtcatgtgttgcttaacaatgggaacacatctgagaaatgcatcattaggtgatttcatcgttgtgtgaacatcatagcatgtacttacacaaacctggatggtatagcctatgacacacctatgctgtgtggtatatagcatgttgctcctagtctgcaaatgtgtacagcatgttactgtactgaacattgtaggcaattgtaacacaatggtaagtatttgtatatctatacatagaaaaggtacagtagatcatatccttactgattttctttctatgtgttttactaattattgagggagaaatatgaagcctccaactataattagaatggcccttttaaattctgttttttattaatgtattttttattttattttattttgagatggagtcttgctctgtcgcccaggctggagtgcgtggcacgatctcggctcactgcaacctctgcctcccgggtccaagcgattctcctgcctcagcctcccgagtagctgggattataggcatgcgccaccacacccggctaatttttgtatttttagtagagacggggtttcaccgtgttagtcaggctggtctcgaactcctgacctcatgatctgccctcggcctcccaaagtgctggcattacaggcgtgagccactgtgcctggcctttattagtgtattttaaagctttatccttgggtacatacaagtttagaatttttatgccttttaggtaaattggtacctttatcattatgtaatgtgcttttttatccaaatttatatcttttgttctgcagtgtccacatatcaattccacttttcttgtgatcactctttacaatgtgtatcgtttaccttcattttgattttaacctatttcttttttatatttaaatggatttttgttgttttgtaatcagcattcattaaaaatttttagctgaatactttttacttttgttagggttccctgtgtctcttcctttcatgttgtgccacagatgagccattatttatatcttttctctcattggaggttcctttttttaggggaaattaaataatctgaaatataaggaaaggatatgttgatttcaagaaaggttgtttttgttccttatctggcttgttcttgttgtgagggtgggagcaatactctttgcagctttctgcattctaggaagaagtggaattttacactaccatttgctttctttacaggtttaccttggtattcagtgtctgtccataggactaattaaaactataccagactccttctattttaaacctatccgttcagtctcaagttatctttttgcattgcctctcacgtctgtcccttcatttcttttaccagcagtgcttggtttttactgtttgctttggttttaatttcctttttatttttttaatttcagaaggtggaagcttatgtcattgacttgagcattttttatgcatgttttagtgcctctttctgactagtctcttcttttctccatccaatccatcctgtgcctgatttttagaaaagactggtgtacagtttgccccttttgctttaaaatttatttttcattgttacaacccactctcagtagcctccattgtaacaccctcccatgctcccaccaccattatgaagaagtaaagtccaaactttctcagtatttgtagttcttcatggtctgtgctttaaccttccttccagtcttattttttatttccattgttggcccccaatgcctgtgttctcttcccttccatatgaatcttccatatgaatatcttccatatgaatatgatagtattcatattcatgcgatctcccctttttttggaatacccttcttttttcttttagcctaaattctgtttttaagatgcagttaaagcttctcctttatgcatatctcttataagatatattatttgcagacttttccccccattctgtgagttgccttttcactttcttgatgatgtcatttgcagcgtaggattttaattttgatgaagtccagttttctatttttttttttggtggtggttttttttttggttgcttgggcttttgatgttgtatctaagaaggccttgactaacccaaggtcatgaagacttattctgtgctttcttctaaaagtcatatggtttttagttcttgtcagtcttgggtttttttttgttttttttttttgagttaatttttgtgtatgatgtgaggaagaggtctaactccagtcttttgaatgtggatatccagttgtctctgcaccacttatggaaaagactattctttcttcattgaattgttttggtgcccttgatgaaaatcagttgactataaaaaccagggtttatttctggagtctcagttctattccattgctctgtatgtttattctttttttttttttttttttttttgagacggagtctcgctctgtcgcccaggctggagtgcggtggcacaatctcggcttcctgcaagctccgcctcccgggttcatgccattctcctgcctcagcctcccaaagagctgggactacaggtgcctgccaccacgcccggctaatttttctgtatttttagtagagacggggtttcactgtgttagccaggatggtctcgatctcctgacctcgtgatcgcccacctcggcctcccaaagtgctgggattacaggcgtgagccaccgcgcctggccgtatgtttattcttatgatagtaccatactgttttgtagtatgttttatagctttgtagtatgttttgaaatagggaagtgtgagttcgacaactttggttttctttttcaagattacttttgttactcttggtacttgaatttccatgtgaatttttaggatcaatttgtcaatttctgttttaaaaaaaggcagctgggattttgatagggattatgttggatctagatcaatttgcggaatattgcattcttaacaacatgaagtcttcagatgcatgcatatggaatgtcttttcgtttaagtctttctttcaccagtgttttcagttttcagagtataaatcttactaaatatttattcttggtgatattattataaatggaattgttttctttcctttttggcttattcattgtaggtggatagaaataaaatctattttttttggataagagcagctaaaatcagttgggcacggaggctcacgcctgtaatcttagcactttgggaggccgaggtgggtggatcacttgaggtcaggaatttgagaccagcctggccaacatggtgaaaccctgtctctactaaaaatacaaaaaattagctgggtgtggtggcatgcgcctgtagtcccagctactctggaggctgaggcaggagaatcgcttgaacccgggaggcggaggttgcagtgagccgaagtcgtgccactgcactccagcctgggcaaaaaaaaaaaagaaaaagcagctaaaatctatgtatttaacaaaaatctctaatacagtaccattttatttattatagtcctcatgttgtatattagatctctggacttgttcatcctatgtatttgctacttcgtatcctttgaactacatcttttcaaaggatgaaattgggtaatgtgatgcctctagctttggtctttttgtgtagggttgccttgactattcgggctctttttcagttccatatgaattttaaaatagattttttttttctttttcctaattctgtgaataatgtcattggtagtctgatagaaacagcattgaacctgtaaattgctttgggcagtgtggccattttaatgatattgattcttcttatccatgagcatggaatgtttttccatttgttcgtgtcatctctgatttatttgagctgtgttttgtaattcttgtagagagctttcacctccctagttagctgtattcctagatattttattctttattgtggctattgtgagtgggttgcattcttgatttggctctcagcttgggtattggtacacaggaatgctagtgatttttgtacattgattttatatcctgaaactttgcttatcagctgaaggaacttttgatcagagactatgggattttctaggtgtaaaatcatcatctgcaaacaggaatagtttgacttccttttttcttattccgatgctctttatttccttctcttgtctgattgctgtggctaggacttccaataccatgttgaataggagtggtgagagagagcatccttattttgttctgcctttcaaggggaatgctttcaacttttgcctcttaagtatgatgttggctgtggatttgtcatagatggctcttattattttgaagtatgttccttcaatgcctagtttgttgagctatataccacactttctttatccactaatcggctgatgggcacttcagttgattccatacttttgcagttgtgaattgtgctgcaataaacaagtgcaggtttctttttgatattatgacttcttttattttgggtagatacccagtagtgggattgctggatcgaatggttgatctgcttctagttctttgagaaatcctcacactgttttccatagaggttgtgctaatttacatttccaccaacagtgtataagcattcccttttcactgcatcctcgccaacatctattgtttttttactttattttccatataaaaaggggtttatttagatgttagaatcatctagtgattcagaaagattggacatgaatccacccaggcccagggctgagctgcagagcagccgctgacatccgcggggatttcacatgcaacagggagctctcacgtgcttgctggccattgtgctttaaatcgttttttccagcggacagctgtgactgcagttttcaaatgtgctctggcctccaaggaccaggggggcggtggggggcgggggtgtcctctgtataaaaagtgctgtcctgcgagcttcccgacggacactttggggcatctgagcgattcccggggagggcagctctgccttcctcaggctaccactgcagccaccgacggacattctcaccagcaatcaaccaaaaaacatcagagtctctgtgaacttggctgcgatgataagaaccaaatgttttctaatctaagacttgtatgcagaacacaggaaattgcaattaggaacaccctacaaaattgaacaacagtattttctaaaaatattttttacatcactttaaataatttacagaaagctacagaaatcatatttaccaggacacatctgttaaataaaagcattgtttcatgttggtgtacgtctatacagggctatgtataaccgactcctgtttctcctccctgcaaccacagaaccatcacacacacacacacacacacacacacacacacacacacacacacacacggatacacgcacagatacgctcctttccacaaatgcacgcaaaccgggacgcaaacccacaactcgagggcttagaccttcactgctgagctgccgccactgtcctccgtgcgcggagtgtcgctgaagtcactggcgtcactaaccaaggcgtgcccgcccaaggtgccctggtcctggtcgtccctatcgatgacccttcgtcaatacctcaggtctaaaatgctttcctccgagcccgagttcctcctgtcgggcaaactccgccctgtctgtgccttgctgcttggccagggcccgccgtccttcttcgccagcaagtgtgggcttccaaagacagggctgggcccggcctgggcctccctgaaggcagagaaggacgggccctgtggaggcagccccatgtcgggctgaagaggctggcctgcctgcccccctgggagacaccctttccaaaatggaagagctgggtggacagcgcggggagaagcccacaaggggtaggctgggcaggccccaggcggggccctcggaccccttgtctttcccgctcccgacgccccgcctccactccgcatctctactttccgagcgcagcgcgcacgggttccggtgggtgaagtcgctcgagggcagggtgtggtcagcctgggctccagagtccctttcagcttcctggctaggggtcaggaagccccggctcccgcagcccatgtgaaaggtccccccagcacctccggcctcggtgcccgctgtggcactgctgggcagctgaataaaagcacttctggcagcatgctcggcccctcgtgagcgctggtctttctgaatgtaaacatttctcctgctcgctgagagccccttggcggagacactgccactggtgctcctgggcggtgccggatccccttgggcgggagcagcggggagccccttcctgccctggctgaacaggtcggctgtgccctgtgctccagcgctctctgcacctcatggcccttctgccggctgtgggacccccctggcccactgactccgcgtgcacacgccaggcggtggggcccgctccttcctgcacagcaactctggcctgaatgagccccatttcccgagagcagcagggccctctgcctgaacttctgaactgctcagactccttggccttttccgcgaaaaacttactaatctacagttcgatgctctcgtcactgtccactgaactcctgtcgtcagacagggagccggggctgggagctgggccctggcattccctggggaaatggattcccttcagaggcggaggcagaggcgcatcccctcactcggaaggccggggccgtgtcctggctcctgacgccctcctgcttcgtcttctctgccatactgccacagacactgggaggtttgttccctggaccctcgccgctgtctctcttggacttggagagtcagctattaagcaccggcgggcttctgtctttccagtctctcgggagcccgcccagctgctccaggaagtgcatctgggcagtgctgaacctgaccttcctgcacgcagccctgggttccctgcacctcttcttgagctttcgcttggaccttaagtccttgatggccgtgtccaggtcctcgtcactgtccagggagctgctcttgtcttcggagctctccttctcgtccaggtgcctcacctcgtctgtcttaccctggccctgcgtcatgcgagtgtcgccgggccccttggctgcgccctcccctcccgggacctcgctggctttgccctggacgggcaggtcccgcccctcatggccgggcacggctcacgcctggctgtggtcggcatcctggccaccatctttcaccacctcccgcgttttcttgggcgtggacggcctcatggcatggccgccgcctctacgtttccttttgcagctcagcagcgggtccggtgttttagagaggggggccttggggccactggtctggctgttggggccaggcggtgaaagtgggccctgggcagcctgcgagcagctctcacctctggccagcaaactccccgactatgcctggagggtcaaaacgtctggatttcctgatcgatgctgtcgtcgctgtccacggagctactgtcgccgtcagagcgggaaggcacgttcagggagtagaagcgtgggcttgcagaaagggacctgttgctgccttacatgggggccggcagggtagtcttggaaatgcccaagattgcttccgcgcgcgtcagttcagcggacgtgtctgcctggcacgaggaccgttctacaaactcgttcctggaagccgggctcgctggaggcggagctttggtttccttcgggagcttgtggggaatggtcagcgtctaggcaccccgggcaagggtctgtggccttggtggccactggcttcctctagctgggtgttttcctgtgggtctcgcgcaaggcacttttttgtggcgctgcttgtgctgtgtgcggggtcaggcgtcctctctcctcccggcgctgggccctctggggcaggtccccgttggcctccttgcgtgtttgccgcagctagtacacctggatggcctcctcagtgccgtcgttgctgctggagtctgacgcctcgggcgcctgcgccgcacttgtgacttgctttccccttctcagggcgccagcgctcctcttgaccccgcttttattctgtggtgcttctgaagggctgcagggggctgctggcttcgggctgcccttgttctcctgcttggtcgtgaccctggacttgaggcttctgggctgcacgttcgtctttgctaaccggggaggtttgcgaaaggcgaactctttatgggcgcccttcagaccctgccgatgcgccacctttgcggctagctcttcgtgggatttcaagagtgacttggtcgaattttcgtttgggtctggttttttatctattgaccccatcacatttttgggtcgcatgctatctcttctcattcagaagctgttctatttccgccttaatgctctgctcgaaggagtcgttgctgctcgctctgaccgggaaggcagaaccctagtcctcactggatctcacctggctgccagggccaccacctgagccaggtacaagttttggggggacacacggaagtcggggcactgccgtgagatagttctggcttacatctactgccactgcctgcagccctggaaggctgggctgcgcctggctggcccctgccagccccgggctgtgcggctccactctttgcctttaggtactcccggatggcttccgcaatgtcccggtccacggaatcatcattgaatctagcaccaacgggccaaagtctgcagtttcctcctccctcatggggtcaaagtcagcaacaagaccacaggcaggcaatgcgggctgctccttgtgcacggtgggcttggcagctggcttggcgtctgccctgtggcccctctgtgcagcgcgctcatcggtggtgccccgagcaaccccgctgcgctgcagcgtgctgatgagcatctgcacccgggcgctcaccgacacgctctccaccccctcgtcagcctccgagaagcacccggggaacctaaagctccctggtgggccaaaggcctcccatttggactggggagcaacccctggagtagcgttcctgagaaacattctagcagaaggggagggacgcgcagagggacgacgctttatttctctgccagcttcatatactcaaaaggttggcagcggggtgcagtggctcaagcccgtaatcacagcactttgagaggccgaggcgggcggatcgcgaggtcaggagtttgagacccgcctggccaacatactgaaaccccgtctctactaataatacaaaaattagccgggcgtggtggtgtgagcctgtagtcccagctactcgtgaggcagaggccagggaatcgcttgaagccggaaggtggaggttgcagtgagctgagatcgcgccactgctctccagcctgggtgacagagcgagactccgtctcaaaaaagaaaaaaaaaaaaaagagtggcaagtggtgcccatgagataaagtctgcaaatgcttctttgcagtttaaaaaggacgacgactataaacccaggatcaggacgacgttacgcatagatttattcttgacctgaccaacgagctcttgaaattctctttgcaactaggtcgactgtgaaactgcagccagtgtccccaaacgccccaaggataaggcctttatcactccgacgcatcctctctctgctttttaaatagacttttgactcggccaggccccctgccacccaccgcgctgaccctgcctgcgcttgcgtcccgcgtcccgcatccggggggaggcggcgggcccgggtctctggggctggcccatttacttagttttgtttttgttgcatttgcttttggtgacactccctttttgatattccacatataaatgaggcaataattttctttctatgtctgcttatttcacttagcataatggtctccctgtccacctcggctcccgcgcggggaggaggggcaagggccctccgcccgggccccgcctccccgcgcgccgctgccaccgccccgcacctttttttgactttttaataatgctcattctgactgtgataaggtggtatctcattatggttttaattggtatttcccttgtgattggtgatgttgagtatttttcatgtttgttggccatttgtgtatcttcttttgaaaaatgtccgtttggctgggcgcggtggctcacgtctgtaatcctagcactttcggaagccaaggcgggtggatcacctgaggtcaggagttcgagaccagcctggcaaacatggtgaaactccgtgtctactaaaaatacaaaaattagctgggcgtggtggcatgcgcctgtaatcccagctactctcgagactgaggcaggagaatgacatgaacccaggaggcggaggttgcagtgagccaaggttgcgccattgcactccagcctggacgacaggagtgaaactgcattgcaaaaacagcaacaaaaaaaatccattcatctagtttgtccactttttaacaggattatttgttttcttcttgctgattttcttgagtttcttgtagattctggatcctttgttggatgtatagtttgtaaatattttctcccattctgagggttgtctcttttctctgttgattatttattttgctatgcagaaactttttagtttaagtcccatttacttagttttgtttttgttgcatttgtttttggtgacaccccctattttttagattccacatataaatgagatcatgcaataattttctttctgtgtctgcttatttcacttagcataatggcctccatgtccacctgtgttgtggcaagtgacaggatcacctttctttttatggctgaataatattccattgtttatatatactacattttgtttatccacttctctgttgacagacacataggttgtttccatattacttagctgtatatagaaatacaggtggtttttgtatgttgattttgtactctgaaaacttggtgaactaatttattagcttcaatagtttcttagtgaattccttaggattttctagatgtaaaataatgtcatttgcaaatagagatagttttacttcttcctttaaaatctggataccttttatttctttttcttgcctaattgctttgtctaaaatctccaatagaatgttgaatagaatgatgagaaggacattgttgtctcttcctggatcttagtgggagaccatccagtttttcaccattaagtagatgttagctgtggggtttttgtagatgcctttcatcagttgaagaattttttatttctagggtgttgagtgttttgttatgaaagggtgttggattttgtcaaatgatttttctgcttctattgatataataatgtagttcttgttctttattgaaatggtgtagtatattagttgattttcaggtgttaaaccaacattgcatctctggaataagtcccacttggtcacaatgtataatccttttgatatgttgctagatttggtttgctaatttttttttttgaggatttctatacgtgtatttataagagattttggtctttagtttttttccttgtgctgtctttgtctgattttagtatcaagataatactggcctttcacagaatggactgggaagtgttccctcctcttctgttttgatggggcagtttgtgaagaatagatattaattcttctttaaatatttggtagaattcatcagtgatgccatctgggcctggacttttctctgtggaaagtttcaaaattactaattcagtcattttacttgttataggtttattcagtttgtcagtttctttctgaatcagtttttatactttatatttttctaggaatttgtctacctcatctaagttacctagttcattggcaaataattgttcatggcattgccattataatcctttttatttctgtaaggttagtagtaatttttttttatttcattcccgattttggttaatttgagccttctctcttttatcttggtcagtctaactagaagtttctcaatgttggtgatttaaagtttttttttctggtttcattgatttttctttatttctctattctctaaaaaattttgatcaaacgatttttccctgttttttcactacccaatgtttatacttaatgtgtgtattggataactctattaaagttcatcatcatgtactttcatcatgtaatagtcagatatatcttatatataattgtactgcctacttttagaattgcttgttctttaaggctttgacttcataaaagttttcactcttggccaatattatttactacagcgtgttttcttcttcatgaggaaccatggaagaaatctttggtccaagacccattaagctttcctggagaagctaactaattaatttaatttaaccttatagatactatgaatcttataattgtttgttactgttttaactgccagctttcatgatagcatgcattttgggggatactaacatttttcttgtcatttttttcacctttctatattttactttcacaattataagtaaataaagacttgttttaacataaatcacactttatagtaataaagagcggatctctgttgctctccttttttactttaaaattttttatttttaattattatggagacataataggtgtacatatttatgggatacatgtgatgttttgatacaagcatataatgtgtaatgaccaaatcatggtagttggagtatccatcatcttaagcttttatcatttatttgtgttaggagcattccaattctaatcttttagttattttgaaatatacaataaattattgttaactatagtcactgtattgtgactatatagtgtttccatagaacactagatcttgttccttctatctaactgtctttttgtacccattaaccaactcctcttttatcctcccatccccactacccttcacagcttctggtaatcatcattctactctgtctccatgagttcaatttttttttttttttttaagctcttgcttgtaagtgagaacatgtacttgtccttctgtgcctggcttatttcacttaacatgatgttctctggttccaaatgacaggatttcattctattttatggctgaataacattccattgtttatatgtaccacattttctttatccatgcatccattaatgggcattcaggttaattccatgtcttggctgttgggaaaaatgcagcattcaacatgggaatgcagatatctctttgatatactgtttttatttcttttggatatatacccagtggtgggattgctgtatcatatggtagttttatttttatttttttgaggaacctctaaactattcttttatagtggctctactaatttacattgccacaagcagttgtgcttttgttttttttttgtttgtttttgtttttgtttttttttactgttttaacataattatttggagcttcattcatgatggcatatgcatcaacaatttatttattctcattactgagtagtatctcactgcatgggatttgtttttttttttaagttcaggggtacatgtgcagttttgttacataggtaaacttatgtcatgggggtttgttgtacagattatttcattgcccaggaatgaagtccaatacctactagttgtttgtcctaatccgcttcctctcccaccctccaccctctgataggtcccagtgtgtcttgttcccctgtgtgtgtccatgtgttctcattatctagctcctacttataagtgagaacatgcagcatttggttttctgttcctgcgttagtttgctaaggataatggcctccagctctatccatgtccctgaaaaacattgctctttttctattcctagttatatccatagaaatgaccattgatagtttttgcttactctgtccctccagtttttccttcctccagcatatacacaaggattttaattttacccaattgaagtcttacttatctacaccttttaacaagtcatcatcagtaattttggaataggcattagattcacatggttcaagattcaaacgaaagaaaagtataaacagtaaaaagtctcctcattcctttccctaagccacccacttctcttcagaggcaactaataaaagtttctagttttgcattattctacaccttgcttttttcatttagcaatatatcttgaagagcacatctccctctgtatttagcttaatccttttagtggattttttttttattttttgggtatatcataatttatttatgaatttcattgttgagagacatttagtttgtttttgaatgtgtaatactacaaaccgttgcggtgaattatccttatatatacattttcatgcacaaatgagagtacttttatagtgtagattcctagaagtagaactgctaggtcagaaggtattcacatttaaaaattttaaatttgctcatagaatgaagtctttgctcatagaatagtctttgctcaaatctcactttaccaaagaggcctatcgtgaccactctgcttaatactgtaacctgcccctacttctccctgaacttctctatccattgcactctattccttttctagcatagtatatggtttacctatttatactgctttttggttactgtctttttccctctgctccaagaaacaggaatgtttgttttgttcactaatatatatttctagcagttagaatagtgtttgatgcttagtaggcatttagtaaatatttattgaataaatcgaatacataagcaaacagtatccaaaattatcctccgtaaaaatgcctaatttcttttttttcctctgtatctcaatgaataaaaaaaaatactgactttctttacccacttattttggatttttttggtcttgttttttgtttgtttgtttgtttttgagtttgacaaatttattggtattttattaaagacattcatctcagttgtttctctctcccagcttgaccttaggttaatatttcatttgggtcaagaaaagaatatcagaagaggtatgttattttaacaaacaggaaaatggacaaaaatggatagtttgcctacattaaagtgagttaaattcaagtatcttgatataattaaatcatataagaactaagagttctatatacatttccattgttttacctggggcttattctaaacttaaatactagttaacaaagagttaggaatatacacaggttgcttctctgagttattaccgactaaaagagctcagcgagcagttaccaccaataaaacggtctgaagctgcctccaaatacaatattgtagtaggagttttcaaggaaatttttatactgtatttttttttgtctgtgactgtgcttttaaagatgtgtttaactgtcacattaaaaaaaaagttcgtatacaatacaaaaatacaaaaagaaaacaccctacaatacacaaattcacaaagtatgtgtggtgagattccaaaaaatgtttgaagatgcattttctttccttctatttcagtatctaaaatgtgctttttgagaggccattggtcaatatgtatacatttaaaataaaccatataattttactagtaagaaagccagtagttaagttcaattcaaattggatttcacaagttagtaatttaaatccttggacaaagttacagaaagtgcatcttcttgttttccatcttcatacaatgttaaattttttttttttggtgtttataccttttaaaaaataaaagcagccaaatacttaagcaatatgtacatttaaatttttggtggtggtttgtattttaaaagaaacagttttcttatgattcgcttcaagttctggtggaaatgcttacaggaactagctaataaacaaaaaacaagagaagcacattcaaaatactgatttactttggtagcaaatggtttttctttgaagattaatgaagatagacaagacccattaaggtgaagtgggctatttcaaatattcaacagtttacatataaaaaagttattttaagagctaagcgtctgtatccactgatagcaatgcaacacctagtttatgatgacttgaaagaaaacaaatgcccatgaagaaaaaagctgtattttaattttatctaaatgtactttcagtcaatagttcagtaacattttcctcccaatacaatactccctctctctataaggctattcctgggagccagacaagtttaggtaataagggagttaagagagtaactgcttgcagttttaaatagacaattaactttttgcttccctcttaatgtgctaatagttgtgtctaaaaaaataggcaattcttaaaaaggtaccatttctgatttctttattatctgtaaactttggaaactaatcacacaaaactaccaaattagcaaatgtcttgaaatctgtatacaaaacataaattacctctaatttcaaactctcatttattggtgtaccactcaatcttttaaaaagatgaaaaagaaaaaaaaagtggctccaaaggtagtcttataccattcttaaaaaaaggaaactgttctttttaactttatacccacccacaccccaatttcaaaacatcatttaattgtcttggtcatagacatttcgaagatgagattttatattccactcccatagcttctggttatcagaaaacccatgctttcctttattgaaggagtttggtccagctgatgttggtgtatcccttgcaatattcttcatcctcatctttgcttctggaggcctttcctctgattcactatcttcatcttcattaaaagctgctgctactgaaagagtttttggagcaagagttggaacagtttctttaggcttacttgatccaagtttgatggatatgggtgatgctttctttgtcgtctgactacctatggcaaatccaaagttggagatctttgcaggctttgttggaggtctgcagcttcttcttcagctgatcgcttctcagcgctgcggctggaactttcctctccattactccagcagctccagctcattgcgacttttccggcttctcctctcccgccttcccatcagccatttcccccgccgcattgtttttttaagatttcagaaatctttctaatacaagttgggatataaataattagatatagaaaatagctacaaggtatttcttttaactttctccacccccagctcccagcagtcaagagtcaagccctaagtcttgtcctttctgtcagaaatagatacaagaaggatacagcaaacactgctataacacctctctcataggattcaaatcagtgtggagattattataggctccagatgagttaggatatctttaagtctcaatttaataaaactaattgttttcctgtgctttaaatatctctccattctatataaatataatatagatctaacagatgtagtcttgaaatagatggctataatgtcagtgaagtattttttccttatttatatacattataactttccttatttatgtacattataattttaaaggcctgatagtcataattattgatgttcagattggtagttatttctgtctcttatgtattcaactataaacatttaatcaagtttatgagacctagatatttagcagagttttggagtaaattattttattaaacaaagaatataaaataaacatttctacttatgttcctgttttaatttacctcatttatatgcatcttgatattgcattttcatattctaaaaactatttttaaagacaggttgattcagaattacagtgtacttgaaaatcatcaggtacctattattagttttcacccacattgaatctgtgtttcagaaactgtctaccaaactttgtttattaagtaattattttccctagttttattcaagatatacaaagctgccaactagtgcttttcatcagcatcaggtaaattgtgttactatactgcgttgaattttagcaaaggtaaagtatttgctattttagttattgtagctttattgaaagcaaacatataggttttttaaagtattggaaaactcgccagattatcattatatgacttggaaccctagaaactcccagaccacgagacttaatggttaatgatctctttcagttctctttcaacttggaattctcttattccaatgccaactcattgctcttttggaaagacccattctttcctctattgtcttggtacctcctcaggacatattccccaaagtggaaatgtcagtttaagataattttcagcattgtgtagaataagaatggttagacagctgatgtcagcaagatggtggaatagtagcgctgtccttcagaaacaccaattttgacaactaccatagaaagaatgcctttatatttgagcatacatggaacattctccaggatcaatcatatgtcaggccataaaacaagtattaatatatttaagaagattgagataatatcaagcatcttttctcaccataatggcataaaactagcaagcaaaaataacaggaaaactgggaaatactcaaatatgtgaaaattaaacatgttcctgaacaaccaatagtcaaataagaaatcaaaatggaaattaaaaaaaaaaaatgtgatacaaatgaacatggaaacagcacatcaagatttgtggaatgcagcaaaacagttccaataggagatttcatagtgataaacaccaacatgaaggaaacagtaggaccccagataagtaacctaactttacatctctcagaactaggtagaaaaagaacaaataagcccaaagtaatagaaggagggggataagaaagatcacagcagaaataaatgaaagactcaaaaaacaatagaaaagagcaacaaaatgaagagtttttttgaaaagataaacaaaattgataaacttttagctagaataagaaaaaaagaagattcaaataaataaaatcaggaatgaaagaggagacattatgactgatatcacagaaatacaaagaatcctgagaatactttgaacaaattatatactaacaaattggatgacctgaaagagacagattgtttgccacatactacctgctaagactgaatagcagaagaaatagaaaatctgaatgaccaataacaaataagggactgaatcagtaatcaaaaatctaccaatagagaaaagcctcaggacctgatggcttcactggtgaattctaccagacatttgaagaataccaatccttctcaaacgttttcaaaaatttgaataggaggaaacacttccaaactcatttaacaaggctagcattaccttgataccaaagtcaggcaagggtatcacaagaaaagaagattataggtcaatatccctgatgaacatatgtgcaaaaattgtcaacaaaatattagcaacagcacattaaagggatcatacatcatgatgaaattggatttatctctgggattcaaggatggttcaacatatgcaaatctataaatataccacttcaacagaatgaaggacaaattatgtgatcatcttaatagatccagaaaaagtgtttgacaaaacttaacattctttcatgatgaaaactctcaacaagttaggtataaaaggaatgtacctcaacacaacaaaggttatacgtgataagcccacagctagcattatactcagtggggaaacctaaaatcttttcctttaagatcaggatcaagacaaggatcatttgtcacttgcattcaacatagtactggaaatctagccagagatattaggcaagaaaaagaaataaaagacatttgctacagtttgaatgttttccccctctaaaactcatgttgaaacttaattcccaatatggtagtattaaagatggggcctttaagaggtgattgagtcctgaggcctctgcctttatgaatggatcaatctattcatggattaattggttttcctgagagtggcatcagtggctttatcccaagctaacatcttagcatgctcagttctctcaccatgcgataccctgcaccacctcaggactctgaggactcacagctattattcaaaaagtcagaagataacagatgttagagaggatgtggagaaaagggaactattgttcaatgttagtgggaatgtaaattggtatgtcttttatggaaaacagtatggaagctcctcaaaaaattaaaactaaaactaccacatgattcagcaatcctaccttttggtagatatccacaggaaatgaagtcagtatgttgaagagatacatacactcccatgttcattgcagcattattcacagtcgcaaagatatggaaacaacctaagtgtctgtcattagatgtatagataaaatgtggtacagattgttttaaactaatgattggttatatcctgataaacccattgtaagtcaaaaatatcttaagttaaaattgcattaagatcatgacaaacccagttgaaaaatcgcaaattgaaccattgtaagtcaaggactatctgttatatatattggaattttattcagccttaaaaaaggtaggaaatcctgccatttgcaagaacacggatgaacccgaaggacaatatgttgtattagtcagacacagaaagacaaatactgcatgatctcatttatatgtaaaatctttaaaaagtcaaatacatacaaacagtaaaaaggtggttagcaggggtggggagcctggggagaatgtggagatgtttgtcaaagggtacaaactttcagttataaaatgaataagggttagatgtggcagctcacgcctataatcccagcacgtttggagaccaagataggaggattgctttaggccagagttagagaccaacttgggcaacatggggagacccccatctctacgaaaaattaaaaaaaattttacaggcggtgacatgtacttgtagtcccagctacttgggactctgaggtaggaggagtgcttgtgcacccaggaggttgaggctgcagtgagctattattgtgccacagcaatccagtctgggtgacagagtgagaccctgtcatgagacctgtctcaaaaacaaaaacaaaaaaagtagtagttctggacacttaatttacagcatggttgattatagttaataataatgttttgtattcttgaaattcactaagagaaatcttaagtatccttacgacatacacacagacaaaatggtgactatgtgaagtgatagatatgttaattagcttaattgtagtgcagtagtgcccccttatcctcagaggatatgttccaagaccctcagtagatgcttgaatccacagatagtacttaaccctatatatactatgttttttcctatcctgtacatatatacctgcattaaagtttaatttgtaaattagccacagtaagagattagtaacaatgactaagaaaatagaacaattatgacaagatgctgtaataaaaagtatgtgaatgtagtctgtttctctcaaaataggtactccgctcacctgttttcaaaccatggttgaccatgggaaactgaaactgtggaaagtgaaaccgtggatatggaatgactgatgtaatcacttcttattgtatagatgtatcaaaatatcacattgaacaccttaaatataaactttttcgtttgtcaattgtacctccataaagctggaaaaaaatgtgacctcatttgtttgttggtgatttccttttttgaaacagcacatgtcatatttggtaaaaggagttgatattgttaatccatataattggatctgagttgtaggaattaatctccttactcaatggttttcaaccttgtttccaagagtagtagatatcagttttgtagctatttttcagaaaagctaattagtagccctttgagtatggtggcagttttctttcctatatggttatacctttttggatggatcatttttgggctttgagctcaataatctaagcagagagcttgaccagaaacttagttctaggtaggttatgtatcatctgttcagaaaatgaggtctgtaatgtcgttctttgtgtgtgtgtatgtgtgtgtgttacccttattgatacttaccagtttgctattaatgtgtgaatgggagctgaagaaactatagtggaaccaacagtcttaacttacactttggtggttcagttgctgcttgtttctctgagcatatggagaaaaaaaagaaaaaaaaacaaagagagaaaaagccactctgtagctactgccacaactttttttttttttcctttttagaactacgctagtgttagtgctggacactacaaggctcttggggtaaagtagtgaattagatacaatatttctgccttcaggatgcttacatattcatagttgagatagggacaaatgagcaagcaagcaagtcacagttcagttaagagctgacaggtttatgaactgagttccataggagtttttcaaatttattttaatttttctgatcatatgctgcatgatctgtaagagttcttaagggagggagtcccaggtgctcaacttttgggcagatggccaggtaaatctgaatttgccaggtacatgtttttctggaaatagaatcaactttcttacccacaaaggcattgtgtaactgggtgactgattcacatggtgttcacccctgcatgttgtttcaaaaatgtgattgagtacaagtaaggtcagtttttacattcctcttcttggctttgccactcttgccttttacttctgtgcacatccaagaatgtccttaacactagactgctgtaagctcatattatacaggtgaaattttctagcgtcttagcctgttattccttctgttcctacgtatcacctaggtaaggaggaaatctaggagcaaaagataaaggcagttcttccccctatttctctgtaataccttcatatttcatttaatgtaaccctactgctaattacttattacagtctcatgaactatgcgtaaggatatatcttttgaccctgaggtagagcacaaaagcacatgtttcttatgacttattttcatctttcatatttcacaaagtgcaagctagatagaacattatttttaacttttgaaattgcaacttaaatttatgtcagttgtgacagcatacatagtagtacttttctgatagttccaggatgatttatgtcaccacttggtggagctcttttataagtaagtgcattgtttaaaaaagcgagtataagttgtcactaattaggggttatcattagattggttcaaatgaactcaactaaatgatggtataattggtaatctcttcaagtactgagtgtagattttgttttaaactgtaatgtatgtgattaaaattttgataaagatttttctcgagtatttctaatttttctctctcctgctttatgtaaatgtagcacttattgacttttctcctattttacaattgtagataatttaaaaaatgtatgcaggattaataaggaaaatgaaaactgttcgtaatcctaccatgtagagataatcgtgaacattttaatatatattttcattttctcttcttttttgttttttcacaaaattggaatcaaaatatgtgcagaactttttattctgtttttttcttaacgttatatgttgggtatttttacatatccctttaatattccttgaaactgttttgggtttttatattattctatgatatagctctatcacaatatgtttaaccattctgttttaagatttttaggctcttcctactatttttgctattataaataacttttcaaacatctattacactaaatctttttttaatttttaagttttgtgggtacatatcaagtgtacacatttatgggacatatgaaatgccctgatgcaggcatgcagttctgttactctaaatcttgactcaactctatttttacttgttaaattcttagctataaaactgaggtattttaaggatttttatgtaccttaacaaaatgtccttcaattgacattattctcaaatatgtttgttgaaaatatgtttgttgaaagtacctttttttttttgcaaagtgcttgttctttgcccattttccccccattttttgttctttttttggtgtgtgtgggggaattgttttggctaggtaagaattacttttcttctgtttcaacaatttttaaagtgctatcctgagtccttttcataattttcaagaaaacacatcagttacagattttaggttgcaaattgttgttggaaaaggagacctggaccttaaaagaggaatcaggctggaaagcagaatgagatatgagaatcatctgtatatgagatgatgagggctgtaggagtggatgagagtgctgaggaaaaaagagaatggtgggaaaaaagcccatggagttgagaaaccccatgaaaaagttgtgagaggaaaagagaagagaatgaggatgtgagggcatttaaaaaagctactgaaaaaagttgcatggaggtatactgaaggagaaaaattgcaacagtgtcagatgctgcatagaggtctttctggattttgcatccatgttcatcagggacatcagtctaaaattctctttttttgttgtgtctctgccaggctttggtatcaggatgattttggcctcataaaatgaattagggaggattccctctttttctattgattggaatagtttcagaaggaatggtaccagctcctctttgtacctctggtagaattcggctgtgaattcatctgctcctggacttcttttggttggtaggatattaattactccctcaatttcagaacgtgttattggtctattcagggattcaacttcttcctgatttagtcttgggagggtgtatgtgtccaggaatttatccatttcttctagattttctagtttatttgcgtagaggtgtttatagtattctctgatggtagtttgtatttctgtgggatctgtggtgatatcccctttatcattttttattgcatctatttgattcttctctcttttcttctttattagtcttgctagtggtctatcaattttgttgatcttttcaaaaagccagctcctggattcattaattttttgaagggttttttgtgtctctatttccttcagttctgctctgatcttagttatttcttgccttctgctagcttttgaatgtgtttgctcttgcttctctagttcttttaattgtgatgttagggtgtcaattttggatgtttcctgctttctcttgtgggcatttagtgctataaatttccctctacacactgctttacatgtgtcccagagattctggtatgttgtgtctttgttctgattggtttcaaagaacatctttatttctgccttcatttcgttatgtagccagtagtcattcaggagcaggttgttcagtttccatgtagttatgcggttttgagtgagtttcttaatcctgagttctagtttgattgcactgtgatctgagagacagtttgttataatttcttttcttttacatttgctgaggagagctttacttccaactatgtggtcaattttggaataagtgcgatatgctgagaagaatgtatattctgttgattttggatggagagttctgtagatgtctattaggtccgcttggtgcagagctgagttcaattcctggatatccttgttaacgttctgactcattgaactgtctaatgttgacagtggggtgttaaagtctcccattattattgtgtgagagtctaagtctctttgtaggtctctaaggacttgctttatgaatttgggtgctcctgtattgggtgcatatatatttaggatagttagttcttcttgttgaattgatccctttaccattatgtaatggccttctttgtctcttttgatctttgttggtttaacgtctgttttatcagagactaggattgcaacccctgcctttttttgttttccatttgcttggtagatcttcctccattcctttattttgagcctatgtgtgtctctgcacttgagatggatctcctgaatacagcacactgatgggtcttgactctttatccaatttgccagtctgtgtcttttaattggagcatttagcccatttacatttaaggttaatattgttatgtgtgaatttgatcctgtcattatgatgttagctggtgattttgctcgttagttgatgcagtttcttcctagcctcgatggtctttacaatttggcatgtttttgcagtggctggtaccagctgttcctttccatgtttagtgcttccttcaggagctcttgtaaggcaggcctggtggtgacaaaatgtctcagcatttgtttgcctgtgaaggattttatttctccttcacttatgaagcctagtttggctggatatgaaattctgggttgaaaattcttttctttaagaatgttgaatattggcccccactctcttctggcttgtagagtttctgctgagagatccactgttagtctgatgggcttccctttgtgggtaaccctacctttctctctggctgccttaacattttttccttcatttcaactttggtgaatctgacaattatgtgtcctggagttgctcttctcgaggagtatctttgtggcattctctgtatttcctgaatttgagtgttggcctgccttgctaggttggggaagttctcctgtataatatcctgcagagtgttttccaacttggttccattctccctgtcactttcaggtacaccaatcagatgtagatttggtcttttcacagagtccggtatttcttgtaggctttatttgtttctttttactcttttttctctaaacttctcttcttgcttcatttcattcatttgatcttccatcactgataccctttcttccagttgatcgaatcagctgctgaagcttgtgcattcatcacgtagttctcgtgccatggttttcagctccatcaggttatttaaggacttctctacactggttattctagttggccagttgtctaatcttttttcaaggtttttagcttctttatgttgggttagaacttccttctttagctcggagaagtttgatcatctgaagccttcttctttcaaatcgtcaaagtcattctccatccagctttgttccgttgctagcgaggagctgcgttcctttggagggggagaggcactctgatttttagaattttcagcttttctgctgttttttccccatctttgtggttttatctacctttggtctttgatgatggtgacgtacagatgggggtatggtgtggatgtcgtttctgtttgttagttttccttctaacaggaccctcagctgcaggtctgttggagtttgctggaggttgactccagaccctgtttgcctgggtatcagcagtggaggctgcagaacagtgaatattgctgaacagcagatgttgctacctgatcgttcctctggaagcttcgtctcagaggggtactcagctgcgtgtggtgttagtctgcccctagtggggtgtgcctcccagttaggctactcaggggtcagggacccacttgaggaggcagtctgtccattctcagatctcaaacttcatgctgggagaaccactacgctcttcaaagctgtcagacagggacatttaagtctgcagaggtttctgctgccttttgttcggctatgccctgcccccagaggtggagtctacagaggtaggcaggcctccttgacctgcggtgggctccacccagttcaagcttcctggccgctttgtttacctactcaagcttcagcaatggcgggcgcccctctcctagcctcgctactgccttgcagtttgatctcagactgctgtgctagcaatgagcgaggctccgtgggtgtgggaccctccgagccaggcacaggatataatctcctggtgtgctgtttgctgagaccattggaaaagcgcagtattagggtgggagtgacccgattttccaggtgccatctgtcacagcttcccttggctaggaaagggaattccgtgaccccctgtgcttcccaggtgaggtgatgcctcgccctgctttggctcacacttggttggctgcactcactttcctgcacccactgtctgacaagccccagtgagatgaacctggtacctcagttggaaatgcaaaaatcacctgtcttctgcatcgctcacactgggagctgtagactggagcttttcctattcggccatcttctagtctttaatttttcatctgtatgatgagaagtgaatccaatgacttttttagattgaaaaattttgaatcaaactcaactaaaatgaacaaaatatatgaaactacaataatgaagacgttatgatattggtgaaaaaagacaagtaaatcaatggaacagaacagataatccagaagtagacccacatatatatattattataagttcattttctacagaggtgcgaaggtaatggaggaaggatattcttctcaacaaataatgctggagcaattgggtatccaaatgcagaaaatgaacttcaatccttacctcacaccatttataaaaactaaccagaaatgaagcatagacctaaacttctagaagatgacataggagaaagtcttaatgagcttgggttaggcaaagatttcatagatacctaccactgaaaacataacccataaaagaaaaaaaatgaataaattgagcttaatcaaaattaaaaacttctattccttgaaatatacttcttatggaagtcaaaacacaagctgcatctgaaataaaggttacattttgctcataggaaagttcttcaggtccttaaaaatcagaacctacttgtagaacatttcacttatgcattttatcatatcagatgatcctgtgtttcattgttttgactactaaatgttctaataaaattcgctgttttaaaaaaatgaataaacaacatactaaattttagcaactttcgcttcattttttaatctttaaaagagagagagagaaaaaaaaaggctggaattgatgaaaggacatatattgagagcagttattgcctgagtgcaaagaagcaaaccaaaatggtaagaaataagcataaaaatttaaagactatggtagttggggttatttattaaagagacaaacaacctttgacatcttattagttcccaagaaattgaccatattaacataaacacaaatacagaagttgatttttgttcattttattaaaatatatatttttaattagtcttgaaaacagtgaagcagtgtatactttgtatcttcaatttcagaaacagtaagtatgtaacatagtttcaaaatcagatttattgaggtataatttacatacacaaaatatgccaattttaagtgcacagttcaatacgttttaacagacatattcactcatataatcaccaccattaagatatagaactttttgatcactccagaaagttctttcattcccctttgcagtcatttcccaacacctcccctctgttccgcaggcaactacagatctactttttgactttaaagattggttttgccttttctagaatttcatatgaaaggaattattcaatgcatccttttgagtctggctttttctcagtgtaataattttgagatttatctatattgttatatatattaggacatttccttttgattttcaaataacattccattgtagggatataccccaatttatttttccatgcacttcttttttttttatatttgggttgtttgtagtttttggccattatgactgaagctgctatgaacattcacatataatgttttcatttctcttgggtatgaatatctgggagtagaattgctatgtgttatgaaaagtgcatatttaactttataagaacttccaaacttgttttccaaaatgattgtgccattttacattttcaccagtgatgtttaagtgttccattgcactacatcctcactgacccttgatattgtcagtcttttacattttagctattctagtgggtgtataattgtaatttaagttgtaaaatatttacatcccaagtagctaaaattaagaaaaagtttagagttggatggtggtaaacctttaattacctgtaaaatttggtaatctggaacaactcacttatcctaaagcttttatataattgatatttcaaaataatgtaagatggtattacatgctttttagctctattgtaatctccagttaagagtaagtaaatagttccaactatttaatgaacattaatttgacatttcttttgtttccaacttaatgtaatccaaaattacccataaaatgtaatatttaggggtggtatatattgtggggaaaaatgtgttctaaagataatgaaaaagtactctagtgataatgatagccatcaatcattaagaactgactgtatactatatactatgccaaaggctttataaatataatttcatttaattgttacaaaatggggtacatattcttattttgattttacaaagacagttaaggaactgaaacatgaaatacaaggttaaaaataattgaataaataaattgataaaaggaatgaatgaatagagcaaggaaagaataagcgaataagaacgtgggcttgtttttttcaaacaaattatatgttatggactctagatctcttaacttagcttcagtgacattggattattgaaaaatgaaactattttgaggaattgactgacccctaaagtttccacaataacttatttaattttttatctttctaatacttttttgccttataatataaaatttgaatgtttgttattagtgtgaaatgaaatcctttcaaatatatgccatcagaaggatgtgttacaaatatacagtattacaaacatttattttgtatgctgaataagaaaaaatcagttataatacagttttaacatagtatccagtgtgtgaattatttaatgaaatatttgatctttattttttgttcccagggaggttatattcaaaagaaaaaggaactgtggggaatctgtatctttattgcagcagttgacctagatgagatgtcgttcacttttactgagctacagaaaaacatagaaatcaggtaaagtttcttgtataaatataagcctctgccataaaaggaaacgaattctggattttcctctcaatagacttttgtgaattagtgagaaatgctaaaataaagtaaaacaaaaagaacttggaccaaatagtgaactgccattctctcatggagccgttatgaaagtgtatttatgctgtatttctttaagaggtagcagtttgtgtcctggaaaaattttcattgtgtctctcactattcatgtgtaagctttcttaattgtggctgttaataaagtgaacagaaaagcaaggatttgtaaataggcttgttttatattaaaacctttatataagtagtttgagtttatcttaaaggtatttaggtaagatttattaaagcctaagattgttttaactagaggatattataactaaatgctttttttcagattatatattgatttgaacatgctacaatacttgaaccagttaattacttaataggtgtttgttgttgagtttataagcctcataagaagagtttattaatgtgttttcaataatgtatgaactttatcttcagaaagtatccaggacttccagtcattttctttgcaacatatttacaaaaatgcaacagtatgtatttttaccaaataggtaattatgtttctccttgaacaaagacatctagaattaaacataattgatattttatttaaacgagatagattaaattgttgcatttttgaaatactttttttgctatatctaaataaaatgtggaaacaaaggccttgtatatttgtaaatatacaaaataatagaaatgacataaatagttcatagagtcaatacctgcaacaccacaggcactcactgcttctctcccttccttgttttcttcccttaagtttcccctagaaaaaaggctttgttgtaacaattcagttttcatggtaatctcaggacaggtattgccatatacctcaaaaaaactggaactgagagtagttctttaataaatgctattctgaggctgatttctttttctttggatatatctgcacttttgttcctttctcttttctcttctaatcaacattctgatcttctattctttgtcatttctactctttctttatttgctttttcacatagcttgtcatggctcccccattcctttctgtatcataggaactttaataaccttttggttcccctgctgattagctgaagcttttatttccccagtgtttgattggtccagcccatttttttgagtgagggctataactcattggttgctggacagcctatggatgggtcaggtgactatcttttgtttcagttagctgctttggtataattccttatacaaaattcatgattagaaattagcatgtgagatgtagttgatgattgctatctttaatatcctattggaaaatgtatatattgatgtttcaaatacgttaatttttatggaaaagagtaacgaagagtgatttaaagttattatttaaactgcttaaattatttaaatcaactttccttttccaaaaataattcaattctaaaatcattggtggggcaaataaagtatgcattttggtgtgtatctctgacaggagggtgccacagggcccagagcaggatgttagagtcaaagtagggtgaggagggcatcctttgtgtgggggcaacctgatggggctgctttgtgtgcagtgtcagagactaagcagggtgtgcaggcagccggtgcacaagtgaggtgaggagggcagcctgctgtggggagtcagaacccttccacagtgaggaagtgtctatgctaaggggtggggtaagtccagaactgggagtcagttctgagaagaacagaaaagtgtccacacgggggagggggtggctttggagatagaaaatggttacttacagggggattgattaaatgagtaagtgaactgaggatgaatgggttccaggtttcccactgtcaatgaagagttacaaatatagaaagggaaacactaaaatgaagcatatggttttatattggaattggatgaatggatgtgaactcatgttttttaaaacacatagacagatacagaataaatatacgcatatctcttcttgacccttcgttttcttatattctcaatgatgaatagatataagcataggtatatagataatagaggtgtaagttgaaggctaattatttttgcaaaaagtaattccttccaaaggatatagtagtgatttgatgtagagctgataatcttttgaattgaaatatctatgatttgaaaacgaaataacacaaatttttaaggttactgatttacttttttctattctttcctttgtagtgtccataaattctttaacttactaaaagaaattgataccagtaccaaagttgataatgctatgtcaagactgttgaagaagtatgatgtattgtttgcactcttcagcaaattggaaaggtaaagtaaacattttattagggttacactctgattttttatgtcattgttcacaattagattctgggaattatttaacacatttagtaaagttagtaagtattaattcttagacttgtcccttttaatgttagctcattaattcttagctttcttatttatccagtaatatgcattctgaatgcttcctggaaaattaaccgttttattatcctttcatgtcttccatttgttttcaaaaactttaagcttatctcccattttagccttctttgccagaaaacttctagttctgaatagaatggtgacataaatttaaacttcttcctaatagtgttatttagtttggaacgagaaaacacttgcaatggatggtgtatgtgacctatactataaagtaatgatttgtactcccaatggtggcttagaggactttttccattacagttcgagtaggagcataattaatatgcttaggttaagttttttctatacttttcatcaaaactgtacttccctaccccaaatgtttcagcccttaatttggcatatgtctgttatcatgtttgttttgaggctcatttcatttgcggttaagagaatatgaaagttacagtgttagctaaataagcaattgtgtaatagcatggtaaagggagaagggtaaaagaggcatggccctattctggagagaatgaggatggagatagaggtggaaagaagcatctccttaggaggatggctctattttctccccctttttcttttttgaccactaaaacttcacaactgtggtggaggatgagaaaaattagagaaaaaactcaaaggcctagggcttttgaaggactgtcttttcttgcccctggttttaattgtaatatggtagcattggccatcttttttttttttttttttttggtcttttcttgatgagaatagaagctttttgcacaagaaaaagggaaatttttaattattaatggagataaattatctaaataatttgcataacaaacatgaactaattatagaatacttggaaaacacagaaaggcataaataaaatatgaatcgaccaaaatgtcaacagtggagagaatcacttttcatattttagaatgtttctttcctttgggtattgtttcacattgagtagaatattatatatatgtgtgtgtgtgtgtgtgtgtgtgtgtgtgtgtgtgtggcttttaaaatttacctaattgtgactttctaaatttttttctattctttaaacttgtttacaacctttttaattcatatctggtagcttattttaatatgatcctaaatacaatgttgctttagagttttttttggtacaatattatttaggcccctgaaaaactggaaacaactgatattcacagctgaagttaaacaatacatattaaacatatctaaacataaaatgttataaatataaaataaaatgtgataaagaataatggcaatattggcaagtgcttctaatgttaaacaaatgaagcaggatatactctgattatgactgtgtgtaaggaagaaacctagaccactaacgcatagaatgaaatgactggagagaagtttaccacaatgttaacccaagttttatatgagtaacttacatttgtaaggaggatgtattacctttctagtaaacaaagcaagcaaaaacttctttaagccaactttaatgagtattctatacatataagtactttaagatctataatcatcagggtttttttttttctagatatagaatttggggactcattggtaggagtgatttggggtacagttctgattttttttcctgctatagtaatttcgactggatgcttccaagttgtttgctctgctgtctgagataaggaatctgcttggatatttgtttctgttgtaagaagcaggaattacatagtggacaaagcattacattgtatatgtttaagggtgaagggtaactatagtggtgattttggtcagagaaaaaaccatagaaggcaatgtccgaatagggtttacaggaaaaatagaaattcaccaagcaaaatgagtgggaactgggagcgagcatcttagagattagcatgtgtacaaagccaaagcagtgatatcaggatgtactttgatattgctaatggctgaaaggtaagaagggatcagattggtagtaatcttgggctttgccctgcaggcagtggaaactccttgaatgattttaaactagggagtaacagttggatttggcctcaaaagaccactcaggactttgtaaaagggatttaaaatttttattgacaaatcatatgagataatttaaagagtaaactttactaaccttaggtggatcagctgggtgttttctatcttatttataccttttttttgaagactaattgagaggattaactgtaattatatattaaagtgatgtgagatgtcataaattgggaaaatctacttgaactttgttttataatgctatatattttttgtttttaaaatatatacttcttaaaagaagatgaataaagcatgagaaaactactatgacttctaaattacgaaaaaatgttaaaaagtcataatgtttttcttttcaggacatgtgaacttatatatttgacacaacccagcagttcgtaagtagttcacagaatgttatttttcacttaaaaaaaaagatttttatggaataatctcaaacatcttgatagttagggttagtttgatcgattatagcaggctacttcataaattaagcccatagatttaagtcctgtgtagattatttatcttctcacaaagaaaatagtataaaatacatgccttgtactacaaagaagaactaataaggtggaattgattcaggacagcatatcaccaactctgagaaaaatgcaacaaatgcaaattcattgactaaatctttattgagggtctgttacaggcactttattaactaataatcagcataatttctgtgtgagaataaatgtaaaaatctgtattaaaatttccaaatgattattttaaatgtataatgcatgctctaacagtatgcccatgtagagctccagagttttttcttggaaacagaatgagtagtacatgagattttctgcctcattggagtagtattgaagataattaatataaagggaaattgtatatttactgattaattgatatcaatctattaattccaacaagtgaatgtctctggaaagattatcaaggcaaagtgttaaattggcaaactaaagtcatccaaaccttcatttttctgctcacagtgttgataattaatcagaaaaaagagcaaaaaatattaaggtaatttgaaacaaagtatgttataacatactatgttttttatatatttttatattagaattgaaatattcagtatttcttttacaaaatttttctttcaaaatgtatacttttttttcttaatttttttttttgcagcttctcatggtcaagaatgtatactattctgtgggctaaatatcatatcttagaattataagacatagaaacattaaatgaatagagataaactcaggtgtaaattatgcaattaaaatggactgcattctattatgcatttaactaaggtcattttttttttaatgcacaaaaagaaacacccaaaagatatatctggaaaactttctttcagtgatacatttttcctgttttttttctgctttctatttgtttaataggatatctactgaaataaattctgcattggtgctaaaagtttcttggatcacatttttattagctaaaggtaagttcattatatttattaaatgctaatatttcaaatgtaataattaaattggcattcctttggactaaattccccaatttttattgagtaatgtactcctccctcattctctgcttggcttattaactgttagcaagttcctataattctggtactagaaacaaccttggaaatgctttatttaatttttgtttctaatattccatcttccctccctttcttttttttgaagaataatgatgttactgttttcataaaaatgatatttgctcatgataaataattcaaataaaataattttggtcacaaaagcacaaagaaaaattatctaaaatccacccagggataatcggcattaaaattacataattgggatgcagttaaggtatagaatttttattatttttgtttgtttatgcaaacagtgttaacttgttatcagttgaaataatgggttataagatagtatttgcaagcctcatagtaacctcaaaccaaaaaacatacaatgtagacatgaaaaataaaaagcaagaaactaaagcatatcatcagagaaaactactttcactaaaggaagacagaaaggaaagaaagaaggaagagaagaccacaaaacaaccagaaaacaaataacaaaatgacatgagtaagtccttacttaccaataataacgttgaacataaatggactaaagtctctaattaaaagacacagactggttgaatgatggaaaaacaagactcatttgatctgtttcctacaagaaacacactttgcctataaagacacataccgactgaaaataaagggatggaaaaatatattccatgcccacagaaaccaaaataagagcaggggtcactatacttatatcagacaaaatagatttcaagaacaaaactgtaaggacaaagaaggtcattatataatgataaaggggtcaattcagcaagaggatataacagtgttaaatatttatgcaactaatactggagcacccagatatataaagcaaatattattagagctaaagagagacataggccccaatacaatagaaatagctggagacttcaacaccccactttcagcattggacagatcttccagacagaaaatcaacaaagaaacatcagacttaatctgcactatatagaccatatgaatctaatagatatttacagaacatttcatccaagaatatacattcttcttgtctgcatattgatcattctcaaggatagaccatgtgttaggcttaaaacattaaaaaagcatgaaataatatcaagcatattctctgatcacaatagaataaaactagaaattaataacaaggtattttggaaactgtacagatacatggaaattaaacaatatgctcctgaatggccatgggtcaatgaagaaattaagagggaaattaaaaaaatttttgaaacaaataatggaaacataacaaaccaaaacctatgggatacagtaaaagcagtacagagggaagtttatagctgtaagtgcctacatcccaaaagaggaaaacatctttttttaaaaaaacttttaggttcaggggtacatgtgatggtttgttacataggtaaacttgtgtcacaggggtttgttgtacagcttacttcatcacccaggaattaagcccagtatccaatagctattttttctgttcctctccctcttcccactttccaccttcaagtagaccccagtgcctgttgtttccatctttgtgttcttcagttttcatcatttagctcccacttataagtgaggccatgcagtatttagttttttattcctgcattagtttgctaaggataatagcctccagctccatccatgttcctgtgaaggacatgatctcattcttttttatgggctgcatagaattccatggtatatatgtaccacattttctttatccattctgtcattgatgagcatttaggttgatgccatgtctttgcttttgtggatagtgctgcagtgaacattcacgtgcttttgtctttatggtagaatgatttctattcctttgagtatgtactcagtaatgggattgctgggtccaagggtagttctgcttttagctctttgcggaattgtcagactgctttctacaatgtttgaactaatttacactcccaaccaagagtgtataagtgttctcttttcttttgcaacctcaccagtatctgttattttttgactttatagtaacagctattctgactggtgtgagatgatatctcattgtggttttgatttgcatttctctaatgatcagtgatatggagcttttttttcatatgcttattggctgcatgtatgtcttcttttgaaaagtgtctgttcatgtgccttgcccactttttagtggggttggttttttttctcttgcaaatttgtctaaattccttataaatgctggatattaaacctttgtcagatgcatagtttgcaaaatttttccccattctgtaggttgttcatttactctgttgattgtttcttttgctgtgcagaagctcttgagtttaattcaatcccacttgtcaatttttgattttgttgtgattgcttttggtgtctttatcatgaagactttgcctgttcctatgtctaggatctattttttttttttgagacagagtctcactctgtcacccaggctggagtgcagtggcacaatctcggctcactgcaacctctgcctcccgggtttaagtgattatcttgcctcagcctcctgagtaactgggactacaggtgtgcaccaccatgcccggctaatttttgtatttttactagagatggggttttactatgttggccaggctggtcttgaactccctacctcaggtgatccatgcacctcagcctcccaaagtgctgggattacaggaatgagccaccacacctggcctggccatcttcaatccatcttgagttgatttttgtatatggtgtaaggaatgggtccagcttcaatcttctgcatatggctagccacttatcctagcaccagttaatgaaatgggagtcttttccccattgcttgcttttgtcagctttgtcaaaaagatcagctggtcctaggtgtgcaaccttatttctgggtgctctattctgttccattggtttacattattctgaaaaaaatgtgcctgtttttgtaccagtaacatgctgttttggttactgtagccctgtagtatagtctgaagttggataatgtgatgcctccagctttgttctttttgcttaggattgccttggctattcaggctcttttttggttccagttgaattttaaaatagtttttttttttttatttctgtgaagaatgtcattggtagtttgataggaatagccttgaatctgtaatttttttggggcagtatggccattttaatgatatttattcttcctatccatgagcatgggatgtttttccatgtgtttgtgtcatctctgattgctttgagcagtgttttgaaattcttgttgtagagagctttcacctccctggttagttgtattcctatgtattctttttgtggcaatttttaatgggattgcctttctgatttggctctcagcttggctcttgttggtgtgtagaactactagtgatttttatacattgattttgtatcctgaaactttgctgaagttgttgatcagctgaaggagctttttggctctaagactacagggttttctagatatagcatcatgtcatctgccacagagatagtttgactccctctcttcctatttggatgcccttcatttctttctctcacctgattcctctgattaggacttccaatactttgttgaataggagtggtgaaaaaggtcatccttgtcttgtgccagttttcaaagggaatgcttcaagcttctgcacattcagtatgatgttggctgtgggttagttataggtgaaaaaaagaggaaaaactcaaataaacaatctaacattgtatcttaaagaagtacaaaaataagagcaaatcaaacccaaaattagtagaagaaaagaaagatcgagcagaaataaatgaaattgcaatgaaaaaattgcaaaagatcaatgaaacaaagtgtttttttaaaaagttaaacaaaattgacaagcctttagctagattaactaaggaaaaaagagagaagatacaaataagatcagaaatgaaaaaggagacattacagctgatactgcagaaactaaaagtatcattagtggcttctataagcaactatatgccaataaactggaaaatatagaagaaatgggcaaattcctagacatgtacaacttaccaagattgaaccaggaagaaatccaaaacctgaacagaccaataacaagtaatgagattgaagccataataaagtctcctagtaaagaaaagcctgggacctgatggcttcactgctgaattgtaccaaacatttaaagaagaactaataccaatcctacttacagtattctggaaaatagactaggaagaaatacttctaaactcattctacaaggcctgtattaccctgataccaaaaccagataaagacccattaaaaaaagaaaactataggccagtatttctgaggaatattgatacagaaatcttcaacaaaacactagcaaactgaattcaataatacattagatagatcattcattatgtcgcagtgggatttatccctgcaatgcaaggatggttcaacataaacaaatcaatgtggtatgtcatatcaacagaatgaaggacaaaaatcatatgatcatttaaattgatgctgaaaaagcatttgataaaattcagcatccttcatgcccaaaaccctaaaaaacctgaggatagaaggaacataccttaacgtaataaaagccatatataacagacccacagctagtataatacttaatggggaaaaattgaaagcctttcctctaagatctagaacatgatgaggatgtccattgtcatcactgttattcagcatagtactggaagtcctagatagagtagtcagacaaaagatataaagggaatccagattggaaagaaagaagtcaagttatccttgtttgcagctgatacaatcttatatttggaagaacctaaagactccacaagaaaactattagaactaataaacatgttcagtaaagttgaaggatagaaaatcaacatacaaaaatcagtaatgtttctgtatgccaacagtgaataatgtgaaaaagaaatttaaaaagtagtcctatttacaatagccacacataaaataaaatgcctaggaattaaccacagaagtgaaagatctctatgatgaaaaccatagaatactgatgaaagaaattgaagagcacaccaaaaaaatggaaaaaaattttatgttgttcatggattggaagaattaatattgttaaaatgtccatactacccaaagcaatctatagattcaatgcaattcctatcaaaataccaatgacattcttcacagaaatagaaaaaacagtcctcaaatttatatggaactacaaaagacccagaatagcgaaaactatcctaagcagaaagacgacgttgcttgacttcaaattatactacagagctatagtaaccaaaacagcatggtactggcataaaagcagatacatagaccagtggaacagaacagagagcccagaaacaaatccacatgcctacagtgaactcatttttgacagtggccaagaacatatgctggggaaaagacagtctcttcaataaatggtgctgggaaaactggatatccatatgcagaagaatgaaactagacccctatctgtcaccatatacaaaaatcaaatcaaaatgattaaggacttaaatctaagaccttaaactatgaaactgctataagaaaacattggggaaaatctccaggacatcagtctgggcaaaaatttcttgagcaatacctcacaaacacagtcaaccaaagcaaaaatggataaacgagatcatatcaagttaaaaagcttctacacagcaaaggatacaatgaatgaagtgaagagacaacccacagaatggaaaaaatatttgcaaactacccctctgacaagcaattaataaccagaatatataaggaacacaaacaactctatcggaaaaaatctaataatctcaccaaaaaattggcaaaagagttgaatacacatttctcaaaagaagacatacaaatgacaaacaggcatatgaaaaggtgctcaacatcagtgatcatcagagaaatgcaaatcaaaactacaatgaggtatttatctcactgcagttaaaatggctgatattcaaaagacaggcaataacaaatgctggctaggatgtggagaaaagagaacccccgtacactgttggtgggaatgtaaattagtacaactactatggagaacagtttggaggtttctcaaaaaaattaaaaattgagctaccatattatccaacaatcccactgccaggtatatacccaacgaaaggaagtcagtatatcaaagaggtatctgcactcctatgtttgttgcagcactgtttacaatagctaagatttgaaagcaacctaagtgtccatcaacagatgaatggataaagaaaatatggtacatatacacaatggagtactattcagccataaaaaagaacaaggtctagtcatttgcgacaacatagatggacctggagatcattatgttaaatgaaataagccaggtacagaaagacaaacatcacatactctcatttatttgtgagatctaaaaatcaaatctgaactcatggacctagagagtagaaggatggttaccagaggctgggaagggtggtggaggtttgggagaggtgaggatggttaatgggtccacaaacatagaaaaaatgaataagactttatagcacaacagggtgactttagtcaataataccttaattgtacattttaaaataacttaaagagtgtaattggattgtttgtaactcaaaggataaatgcttgaggagatggataccccattctgcataatgtgcttatttcacagtgcatgcctgtatcaaaacatctcacataccccgtaaatatatgtactatgtacccacaaaaattaaaatttaaaaaattatgtaattgtcattccagatatcttcatatatacattttgattaaaaagatgggtagttgagtgcattcacgaatataattttctaaaactaggttcatattacagtgctacctttaaaatataaaaattaatttcactgaaattttatagaagagagaaatggaaggaattgcttaaatttagataagtattttgtcactttaagtgatattatttctaaaattatttctctaagattatgaaaaaatgtgaaaaaattaagaggttacaatctttatttaagtttgtgtttttatttaaagcaatatactttaatctggtttgaagaaggttactatcttcactcttcctggtgcctccccctctccattttcagattagtccattttattgttatgacattatcaagtattataacatttaaattctattttgtcactataattattgcatttggttagtctcagttctgtatttaaatggattctaaggttatcataactcctatatcatagtttctccatttctcagttctttatttttattcatctcttagctggctgtattttacaatcaacaagtttttaaaaatatgctttttggttccatgttctttatgtttgacatgtttaggaatcatgtctatagcttttatacttgaaggacagctttgtcatgtattctattcttgagtcatattttgtttccctcaggacaatattttctggcattgaacattgctgttgagaaagctgagactagcgtaattccgctcctcatttacttcctgaagaattttttttttaatttgaggtttaataccttaaacaggataacatttcttgattttgttattctgtattagctttttttttttgaacaccatatccttttttaaactgaaggttctgctgttcattttagaaaatcttaacatactctatttaaaaatattctattcagctaggttgttctataccattgtattttgggaacattttcttatgttggattgcttttattctccctatttattgtcttctctcatattattctgaatttttaaatctttttcttacatattggctgtttttatctcaagcattttttccattttgagctaaactatttttgtaatggtgttatttggtcctcatcttttttcttagcttgtctatttccttccttttatataatttgttcattaatttcctttttatgatacatttttattgaattggatttataatagacgaattattcaataatatgtatttggatcactaaacaaatatattgagaatagcaaatggattttaaccctcctgctaacccagatcaattgctagtggcttcccggcccattgtgttaagaaggactctagattagcatcaggtctctacagggaggggtacacttagtgatgtgatggctgccaagtaaaagctatgaggtggtgatggtgatgctaccctcttatctcagaggcacgtttacatttcatatagtacattacaggtgactaaaggtcatggttgtgcatcagagagggtaagatgatgatcaggagaagcttcaatattaccatttatttattgattcaacagttagttatttattagaatttacaatgtctcaagcatgatattacgtgctaggttaaagtggtggaagatgtatatgttccctgctcagctagaacttacagtcaagtaagggagatagacattaaatgaacaatcacagaaatacttaactacatttgcgataaggaatgtaaagggaaagtgtaatcccccaatgggttcttcctgctggctgcacagacaaaatcaatccaccaagattgtggcattgcagtagagatagtttaattgaccactaggctgacccatgtgggagaactggagttatcactcaaatcagcctcagctggttaagttcttagtgcaagcactcatagggcattttcttcttttagattatctttcagattgggttctctgtctgatttttttccccttcttatgttgtgattcttttttgattttctatgtttacataatcactgtgcttttccccctcgtattgctgggactgtatatgtgtaaccctgatttgatgttctgttttctctgatttaatgtgagtgaatatcccttcactctgcacttaatctgtgacttgtttatgttccccaaagagctatggtatgggagcaggcatttttattatatctgcttttagtcaggaggtaagggagaaagtagataattcaactgtaatgatacaagccgttgttctgagtttttgttagaatgaactttataacagaacacttctagtggcagttttatcttttttctatagcaggattgttttgggattcaaattgtccccagttcaacacagtatgcagagtctctgtgttgtcagaaaaataagctatagttgtttacttcctccattttactcttctcttatcagcagtttctccctccaagtcagagaggcaaaagatgaggataccgtttgagttagtctcgctcagtcagtctctcatttgatattggtaccagcactttaatacctaataaaatgaaagcaaaagaatgtacttgagagagattctttcatctgacttcaccgtttttacctagaaatccttgatatcgttctttaccactatggtattttaaaataacttatttgtgaatatattgcagacatattttttgcaccataccattgtatctagaaaacctataaagatgcaacgttatctgttttctcacaaagtttctgcacatccagtgtttgctgagattattactggtttagcagtcagatactcagaaaatagaaagtgaatcaaattgaacttctcttttaaaaataatgtatgacatggagccataagcaaatttgtaatagctgtgttttatcatgatttgtatattttatgtagctacactatttgttttcttaggtatctgttatatgcatttattttctcacagccatctagttgtatatatattctaataactttaaagattttatggtgaacaattattttatagatgactttaaatttatatactaattttgttatctcttaatggttttggttattgtaagattttagaggggttgaaattaaaaatatataaggtttagatataaataattggaataaaatcataattttataaataaaataattattttaaatttttagataatgagaattaattgaatcattggaattagaataaattctaataaacttagtaattttatataataaatatacttataaaagtggaattaaaaatttgaattctaattattataataaaatattatacaaatataaataaaatatttataaaattagaattaaagattagcatttatcatacttcaaaatctttctctggagtaatacattctatagttcttaaaattagaaataaatttaaaaagcaaaatttatagtgattttagacataaagaattaattataacagaaatacttaaatgtaaaattctcagagtagacttaacacttgatttataattccataactttacatatttctattttacatattttataccttttaaaacagattttttttttttttacaaaaaaaagaaagaaaatctttaccatgctgatagtgattgttgaatgaataaatttatggatatactctaccctgcgattttctctcatacaaagatctgaatctctaactttctttaaaaatgtacatttttttttcaggggaagtattacaaatggaagatgatctggtgatttcatttcagttaatgctatgtgtccttgactattttattaaactctcacctcccatgttgctcaaagaaccatatagtaagtatttaatttatgccccttttactttctcattcagcagttgcttattgaatgtctagtgggtaccaaacatggttctaaggctgacaggatgataaaaaataaatcagacatggactttgcccataagtagtgtaagttatagaaggaaagataagacatggaaacaaatgattagagtatatggtagaaagtggtttgggtcaaaatacaacaaatggaggtttgggagacaagaaagtttttccagctgtggaagaccaaagaataccatataaaagaagtagtatttgaaattaacatggaagagtggttaggattggggaaaggcattctcagtaaagtgttgggggagggcattcccagtgaagaaaagcaagaaacaagaaaaagatatgaatgaaattgcatggggaagagtggcctattctaagggaacagcttaactaagtttttattactattggatgttgtaataactatgtatttttttgtatataagctataactcatactatttcagtgggtgatgagtgatgagatgggaagtatatttaaataaaaataacttgctaatataattagatagcattaaggaagtatgagtaaggtatattccttttagcctagaattgcttcctttcatggcttcaagagtaggatttcaaagtcacttattatattattatatacagaaaaatgtaaacttacttaaggtcagactaattccttgcttctgaaatgatgaaagtattaatgctaaaaataatagataacatggaagtttcaaagtgttgttgaaatggatggaaggatgaaggctcattaaactttgtgaacaagaatttagtggaaaaattaagtatggagcagaattttgaagatgtgttgaacatggtttggcagagaaggcagaaaccttcatttagcagaaaccacatgcaaagaaagaaataaaaaaaattctatatagaaaacaaatatacttcaaattttctcccaaattttataaatttcctttatataccctttccccacttttttcaatgttataactttaataagttgatgttgcaagttactttaggttgacaatctttgttcttttggataattcaaatgtacatgtgaattctctaagtgctctgttaaagagaaatcagcatggggtattattgaactgactgaatatggtaactcttagttaatttttgttgtagagaatttcaaatgaatacaaaaatagtagtataataagcctccatgtacttatcatgtaacttcaacagataatttacagttaatctgtagccccattgcctgctcagttcccccagctgtattattttgaagcacatctttgcataccatttcatccttatacatctcagtatatatctctaaaaaatactttttaaaaagcataattacagtgctctttgttatcacacctacaaatcaataaatagtgactccttaatattactgaatatctagaaagtgctcagattttcttgtaaaaataattaaaaaatttttttacagtttgaatgagaatctaaataagatttatactttgtgtttggttgacatgttttaaaaactcttttaaaagtttctcttccatcctttctttttttccttgtaatttattttttaaataatcagattgtcttgagttttccacagtgtggtttttgctgatcatattctgtggtatagtttaacatgttcttctgtcctctcaatttcttgtaagttgttgattggatctagaggcaatacatactttttatacttaatcatctgtaatttttttttttttttttttgaggcagagtctcactcactctgtcgcccaggcctggagttcagtggcgcgatctcagctcactgcaaactctgcctcccgggttcaagcaattctcctgcttcagcctcccgagtagctgggactatgggcatgcaccaccacacctggctaatttttgtatttttagtagagacggggtttcaccgtgttggccaggctggtcttgaactcctgacctcatgatccacctgccttggcctcccaaagtgctaggattacaggcgtgagccaccacacccagccatctgtaatatttttaatagctgaacctgtatttagtttggattgggaatgctgaaaataatccaggagatttttttttaaatcacagtttattatcatattattatatttactataatatattttatacctatcttttaaagacatcataatttactaaaacttaaaatattgtttttatgctatgtctagaaattgaattcagaaatatttgctaattatttttaagactctaggacagaaaacttttttttcctcttgcagactaaaatacgcttagatttagtttgaaagttggctatttccatgccttctctttgtatttgtttatgagactgtagtttacagttctttttgggagcagagtagaagagggatggcaaaaactaatattagtacataatttgtagtagatatggatgaaattgttatccttctaatgaaacctaataagtaaaagtagtagaatgttaccaagattatttttgacctaagttatagttagaatacttcattattttatatgatggatgtacaattgttcttatctaatttaccacttttacagaaacagctgttatacccattaatggttcacctcgaacacccaggcgaggtcagaacaggagtgcacggatagcaaaacaactagaaaatgatacaagaattattgaagttctctgtaaagaacatgaatgtaatatagatgaggtaatttaacttcatgatttctttaaaacagttaaagtagatttagatgtaagttctccctaacaatatttacttcttttgttatgagcatgttttttttgtaattagtgctaactcttttgcagtagcaaaatatttagaaaaaattaattcgttatatttagttactttgattttaaagagagtagctccctcactctggaatcactgaaaagtatataatcaagacaatagttttcaaatgtagtttttttttttttttattcctctgaggttactgatacccctaatgttttaaaataccctgccaaggctgggcatggtggctcacacctgtaatcccagctctttgggaggccgaagtgggaggatttcttgaggccaggaggtctagaccagcctgaacaacatagcgagactctgtctctacaaaatacatatttaaaaaaatgaactgggcatggtggcatgtgcctgtagtcccagctacttggaagactgaggcaaaaggattgcttgagcccagaagtttgaggttacagtgagacatgattgcaccactgcactccagcccgggcgccagagtgagactatgtctccaaaaacgaacaaacaaaccaaaaaagccctgcttagaaaactctagtgctctagtgttttagtttagtgataagtgataccaacattaaatttctgtttggccttctataattactctctttctaaatattacagcacataatgactgctggagaatacatatgaattcccaggaattacttgtcttgttcatagaatgtggatgttagaaggaatcttacaaataatgtattcaatctcctttttataatgagtaaacaagcttccagggactgatagcttattatttacagcgtctacattagactttgggatatctggtactattgcttctttcctttttaccatacagtttttctcatagtttgttttattgtccacaatcactaacaccagatagcagtaaaaaatgttacatctttgaaatttctctgttaactttgggaaggagtgagagtgtggtcctaaaatctagtttaagaagtattagaatgatttatcaagatatatcatagtttttgcactatggcttactaatttcaacaaatatacagttgactcttgaacaacaggtttgaattgcatgggtccgtttatacacagatatatttaattacatatattagaaaaaattttggagatttgcaataatttgaaaaaatttgtagcaaaccgtgtagcctacaaatacagaaaaaattaagaaaaaggcatgtcttgaatgtacaaaatatatgtagatactagtctattttatcatttactataccataaaatacatacaaaactgtagctgcagatgcctgctgtttcaggcggacgatttttgttaacagatgacataaacttactgtaaatgtattttgtcttcttacaattttcctaatattttcttttctctatctttatcataagaagatgatatatttagtatgtatatatagtacatatacaaaatatatgtgaattcaatctttatgttattggttggcttccagtcaacagtaggctgttagttaaattttgggtactcaaaagtaatcgataggtctgtagtctcagctacttgggaggctgaggtggaaggatggcttgagcccaagcatttgaagctgtaatgcatgtgattgcacctgtgaatagccactacacttcagcctaggcaatatagagagaccccttctctaagaaaataataaaaaataaaaaagttatacacagattttttactgcatgggggattgacacctctaacttaccctgcattgttcaagagtcaagagattagattttgttttaaattttaatgatcatgttgtaacttcatctttttcaggtgaaaaatgtttatttcaaaaattttataccttttatgaattctcttggacttgtaacatctaatggacttccagaggtaatctgaaaggaaatttaataaaatattaatgttttgagactgtggagggaggataattgtctaactttcttagatcaatttactgtgtatcacattttttttttgcccaagaagaatctagccaagtagaattgtggtgaaactaacttttgtatagtaacaaaaagcttttgagtatataatcaaatgtattagcatcattttgtgatttatactagaaatcaatctttattgaattttttccaaaatcaaagtatagacttttaaacttctaaataccattaaatagctaaattttaatagctaaatataaaccattaaatttgctttggtaagcctcattaagcgtaggaaccatgattaatgccatcaacattattggcattactacattgtggaacatctcttttgaggatttttaagaactgcttaattgaaaatacaaatgtatttgttgaaatgactgtgactattgcagaagtgttttaccttagtgatattccatccatctacctgttttgtttcgcattttgctacaaatgtctttccaatgagaacagaataactgagagctttgcatggtaagacgaaatatgtggagaaaaggatgctgtgatagatgatgaagaacaaaaccagtgttttagaagacatagtattagtcactatgaccaaaaggcatgaaataaaatagctagactgctagttctgtaacctgaattgatagctagtttttgaattaatttattaattcaacaaatattttttgaatgcttaatatatgtcaggcacgtgctagatactatggatacagagatttcactctcagtcactatccttaaagtgctagtgggagaggctgacaaagaaatagagcattacaggagtctacaagagtgtgaaaaaagtattcacagggttctgtgatatctcaaaggagagctacctaatccaaactagggctgataggttttgtggaaaatagtttagaggtgatgtgatttcaaatctgagtaagcattacagatatagcatttccaagggttggacattgtagattcaaaggtgcagtgatgtatgatagtatggtctgatcagtgaactctaagtaattcattaaggttgggatacagggcagaacaattaaaatatggtactgaagaggcaagaagggaccaaatgttatattaatgagtcttgttaccacttttggtaccaaaaactaggctgttcataactttaaaatctgttgtagcaatctttttttctcctttaaaaggattatagttttaatataaatcttaagagtaattttactttttctccaatatttcacataatatagccaatcaatagatgactggtaattagtgcctcaactaaggtaggacaggaacaatgattaaacataagcatggattactgttctatctaatacatttatgaagattaatgaaaagtttgcatttaattggatttcttcctatcactccttttaaaatgcaattttacttctctgaggttggaatcactttggcgttaaaagtcacagtagaaggcatgccaatagttttctcttgggcattggtttttaaagtataattaaaaaattatggatcagaactgatgaaagatttacaaattctagcaattgaaaaagtatctaagattgggaataaattgtgcaagtgtgttaattgaactgataaattgagctaattgtcttgcccaagatacttaactgaagggtactggagtgaaccaaagggtttagaaaacattggtagaatatgtaatcaagaggatttgcaacaatgtttgaaaaaatattttatattgataagcataaaagattaaaagcaggctgggcgcggtggctcacgcctgtaattctagtactttgggaggccgaggcaggtggatcacctgaggtcaggagttcaagaccagcttggccaacatggcgaaaccccgtctctactaaaaatacaaaaattagccgggcatggtagcaggtacctataatcccagctactcgggaggctgaggcaggaaagttgcttgaaccccgggggcagaggtggcagtgagccgagattgtgccactgcactccagcctgggcgaaagagcgaaactccatctcaaaaaaaaaaaaaaaaaaaaagattaaaagtaaagcatatatgggatgtttggaaaatcttggcagttaaacagttattataatacctatttttatcttaggtactgttttgtagcattggctatctttgtctacataaaattctaataaatattttctatgcacgaaatagacctaaaatcaaagttgaacaaatgttgcaattttctgtacctcacttttagatagaccttatttatattgcatgcgaactcagtgtatattacaaaattaaatgtatattatacaaaaattctttaatgaaatctgtgcctctgtgtgctgagagatgtaatgacatgtaaaggataattgtcagtgacttttttctttcaaggttgaaaatctttctaaacgatacgaagaaatttatcttaaaaataaagatctagatgcaagattatttttggatcatgataaaactcttcagactgattctatagacaggtattgcacatggtatatttgattgatttgctttagatataggttgatactgatataggtagattatatagtctttagcttagtgacctttagatatcatttataacaaattactttcaaatgtctttatacaaagaaaagtttaacagtattttaagcatataacttatctacaaatatagatttaatgtgaattgtgtgtcctataacagttacctttttgcagttaactgaatataattttttaaaatgtgcaccaaaagataatggctaaagtaattagtttcttcaaatagtggtctctaccttatttctatcctttcatatactattgcctgcctggtttatttaaaaaagtttatacaaaagtgtagtctctgttattatcatgtagaaacctaaaattggaatggttgagagtgattgttaaaatttttgactgatcataagtaaagttaattttgtgtctttagcatgaactcttttaatatgaaactgaaaatatgcgtaatttagaagttaaacacagtaaaatgttttaaattttatttaagtggaaataaagtttttagaaggaataatgcattgaaaaacttgagttttaatgctttttaatactgaacaacttggttatcaataccaccagggagaaagcatctgactttcacttttaaaaaaagacttaatgattggtatacctctttgtcataaacataatggaaagagacccacaattaaaaagagtagtgaaaaatattttatttaagcagcagctgggtcatctattttctatcctatctattattgagttatcattttatatgattttatgagacaacagaagcattatactgcttttttgatgcataaagcacaaattgtaaattttcagtatgtgaatgacttcacttattgttatttagttttgaaacacagagaacaccacgaaaaagtaaccttgatgaagaggtgaatgtaattcctccacacactccagttaggtatgaattttcctacttttaattatattataattttgttattcatggctttatagtgtttcagatttgttcacgtttctttatgtattcatacatacatgtaagaaatatatattgaaggccaggtgtggtggatcacacctgtaatcccagcactttgggaggccaaggcgggcagatcacctgaggttaggagtttgagaccggcctggccaacatggtgaaaccccgtctctactagaaatacaaaaattagctgggggtggtggtgtgtgcctgtaatcccagctgctcgggaggctgaggcaggagaattgcttgaacccgggaggcggaggttgcagagagctgagatcgtgccattgcacttcagcctgggtgacaagagcgaaactccgtctcaaaaaaaaaatgtgtatatataatctttgtgtgctgggcattttactggttgctgaagatatggttattggacctagttttgtctgttcttaaagaacataacctaaaataggaatgtgttccatttcagtaaataaaaaagaaaaaattaaagtatcactatttgatctgcatgcaaccttaaaggattagaactattttttatgtctttttcctcactcatttcccacatcaaaatctgttatcaaggcttgttgaataatctacctccaaaatatttcctgagtgcatctacttttctccatttctgctctcacaactcttgtccaagacattgttctctttctcttggattttttgcagtagcctactacctgatcttgctccttctggtctcatcattgttcctgtctcctcaccatcaaagatattctccatagagcccccagaatttctcctagaaatgtaaatcagttacattcaccttgctgttaaacccactgactgcttcccattgcaattggtatacagtgcaaattccttaacaatgcctaaaagatcttatatggtctggtttctgttgcctctccaacctcatcttgttttctttctcactctgtgttagccacactttggccttctctgtttcttgggctttccaagttttttgaaaaccctcgtacttgatattccctcttcttgaaatttcctccttttctttccatggattaccaactgctactcttcattcagcacaaatattgcttttgaaaagatatttctctctgaagtattttattatttctcatatcatcctgttccattcctttatagcatgtatcccaatttatattgatagattcatttgtgtttgcttgcttttactaatacccaaaatagccttaacattccatatcacagagaccataacctttttgttcactgtctaataattagggcctgttataaaacttggtacatagtaggcaatcagtaatatatttcaaatgactgtatagatatgtaaatggatacattttcatataagtatagtatatactttggacaagataatgagatgacacagaagggactataaagcaatgtctgaactgaattttgaaacatgcaaaggcctgtgtcacaggataaagattttagggagtgggaacagcatgttcaaagggctggaattgtgaaacatgtaagtggagaaaaccctgctgtcacaccaccgacaacaatcaacacagaagacttttgtgaccaaatgtgggaaagttttcctcaccaagaaacaagcaatcagttctgcagcagtcaccagctgggtgtcctctaatttacttctgacactgcttacctggagatagtgtcagatcccacaggttgagggctcagtccccaaaactggccccaacttcagatgccagttgcaagtctgggtttttggatcttctgaccaaagggcttcaagttggggttcccatgacacctcttaggttcgattaatttgctagagtagttcacaaaactcaaggaaacacttctgtttactggtttattatagatgatattacaaaggatacagatgtaaagatgcataggatgaggtatgggggatgggatgggaagcttctatgccctccctggccagacagctgtccaggagcctccacatgttcagctatccggaagttctctgaaccctgcccttttgggtttttatggaggcctcattgcataggcatgacagattagatcattggctattgattatcaacctaaccttcagcttccctccccttcctagaggttgggggctggggctgaaggttccaaccctctaactctgcctcgggctttctagtgaccagcccccatccagatgcttcctaggggctgccagccatgtcaattcattagcacacaaaaggacatcactggagtttctaagtattttacgagttgtatgtcaggatatggggtcaaagaccaaacatctatttcacaatatcacacaacacaatgtgtctggggaactattagcagctctgtattgattgactataaaatgagagtaggaagtcacaggagaggagagtgggtactagatatgaagggccttatatgccatactcacaaatttggagtgtagcatgtgcatgatatagcctgtgctataaatggatgttaagcaggggtaaggataaaatcagacataatttttgcaagttcacatggtaatagtcagtggggggatagactgaggagaataagaaaaagtgagaaatagacctgtcagtctgtctcagtggttcttaaccatgtgtgcaaattagaataacctgaggaattttgttttgttttttctttttaaaaattttgtgtcccattccactgaggaatatgcctaggccttactaccacagacatagtgtataaaaatctctgggcttgtctgttgtagcagtttacttgagagtttttaaagatctgaaccaacgatagtggtgggaatgaaggaacaataacagatttgataaatatttgatgaattcatacttagaatgttgttcttgaggcatttctgaagaagatatctagtaagcagtaggatagccttctatagatttgggaatcatcaggggagttaaacccataaaaaaaaatgagattgcttgaagggagggtgcataatggcaagagtgggtggctaagggctgaagcctaaaggatgctagcattaaggactagacagaaattgttaggttctagagcaggggtccccaattcccgggccagagactggtctgtgtcccattacgaactgggtgatacagcaggaggtgagtggtagacaggcaagtgagcattactgcctgagatctacctcctgtcagatcagcagtggaattagattctcataggtgcatgaaccttattgtgaactgcgcatgtgagggatctagattgtatgctccttatgagaatttaatggctgatgatttgaggtagaacagttcaaaaccattccccctactctccatggtccatggaaaaattgtcttccatgaaaccagtccctgttgccaaaaaggttggggactgctgttctagagaatgggaaagtatgattggggagtgcagagattgaagcgaagaaagctgagggagggagggagtttcattaagagcaagtatttctctaacagtgtcaaatgcttcaaggaaggtcaagtattagaacaaatgagaaaagtcttttgtttttatcagttggtcatttgtggctttaatcactgtagcttaaatatgattagtggacacagaagcatatagaagctgtgttgcaatatatttgaaagacgaggctgggtgtggtggctcacgcctgtaatcccactttgggaggccaaggtgggcggatcacctgaggacaggagttcgaaaccagcctgggcaacatggcaaaaccccgtctctactaaaaatacaaaaattagcccagctgggcacctgtaatcccagataatcaggaggctgaggcaggagaatcacttgaacccgggaagtggaggttgcagtgagccaagattgcgccactgcactccagcctgggcgacagagcaaggctccttctcaaaaaaaaaaaagaaaaagaaaagaaagatgaggaagtgtaaatactggtttagacatgcttagctgagaacactgagcatattttactaaataatagttgaggatcttttcagccctaaacattctacagttctttgcataattaaagtgtcccaaatgttcagctactccaaaattgtaacattgatatttaccatatactgcccccttcataatacacacacataaaattatagaattaacaagatcttaagagattgacctaattttatgctgtgaaagtggtgatttttaaatgtatccaggatcttagtatcctttcttcttgaaggtctctgtaaagaaaaatcatctgattctttacttgagttgctaagtatcttattgtctttaatttgaaaatgtttaatatttggttgtaataatgttttcttaaaacaataccattttgttgccagtttatatagtttctcctaaaaataatgccactattttattgatatgtagttttattagtaaataagtatatctgttctataactataaacttattgattgtgaatacatattttcttaaagatttaagtaaaatgtaatttcttataaaccacagtcttatttgagggaatgtagagacaagtgggaggcagtgtatttgaagatacatttaacttgggagattgaaaacatttcattttttctttttttctcccttcattgcttaacacattttcctatttttatcccctctaggactgttatgaacactatccaacaattaatgatgattttaaattcagcaagtgatcaaccttcagaaaatctgatttcctattttaacgtaagccatatatgaaacattatttattgtaatatcttggcaaagaaacttgaaattaaaagttaaagtactgagttctttttaaaatactaatctcctatctaacatgtagttatccataatcttttcttgcttttttaatcttacaaattatatattattagtagtattgttttatttatacagtgttatttaaaacatttttatgtttacctatttgccttgctcaccattcttccttgcaacttatgcctcacttctgagataatttttttcttcttcagatatatcctttgataattactttagtggtattaatttgggatgaactttttgaggttttattttgttttttgatctgaaattttctttacccttatttttttgtgagatagctttgctcgatcttcaattccaggttgacatttactttttagactcttataagtttgaagataatacattacctggatcccatttttgctaattaagaagtcttatgccactcaatctaactgttgttcctttgtagttaatctgtctttttctctctggctacttttaagatcttttctttgaatgtagtattagataggacttaacattccccatacccctacaatctttttcatccaatatttaacccatttttatttacaattcttacctggccctgttagcattatagtttgcaactcctgatagacaataagtttaatatctgaaggcatctgataccctctctcccctaaagacaaggagaaagaaagagagagaatgaaactatcatctatattgcttgcttgctccttcactccttacttaaactcagatgaggattgggacccactgaaatgctcatccactaaaattggacatagggtcaggagacttattaaaatttggcttatttcagcaactgtgctttttgtacttgttaacaattcattcattgccataacctgcctgtgattttgtcataatctgttgtcatctcttgctatgttcccccaggaattagcaaagtaatttctgtcatcatgttcgtaattgttttggctcagaattgattttgtttgtccaatatgcataaagtcgcttttgtttatgagttatctatagcacaagaatatatgccaaaacatatgtaccccaattacctaaaccttttagcaagggctaatgaaagaatttaaaagaatgataagccctttcttctcatatcattttgaatacttcctccaatatttggagtatgtaggagttcttttttatttaaaaaattctgcctcaaagacttttttttaaacttggaaactatatgatctttttttatgtttttatacagtttttcaaccctcgctctcttccttccctcctccctctagtagtctccagtgtctattgctgccatctttatgtccatgagtacccgatatttagctcccactcattagtgagaacatgcagtatttggttttctttttctgtattaatttgtttaggataatgacctccagctacatccatgtggctgcaaagggcataatttcattctttttttatgactgtatagtactccatagtgtataagtaccacattttctttatccaatccaccactgaagggcacctaggttgattccatgtctttgctattgtgaatagcataccagtgaacatatgagtgcatgtgaaagacattttctagagctcaatttaaagcttaacttttaatgaagcttaaaagcttaattatgtagatgataagttgcatatgtcaaagtgaacatgtcttgaaggtcattatgtttttccttcattttacttccttattagttcaaatttcttcatttttaaaattaatgccaccttccctccatgtaaaatcttagaagctatgaacattttaatggacattttggcaacaattcttttatgacaggaaatgcttgtttgttatatgtttctaagtttgtgtgctgttttttttttttaggaatatagaattgctgatattctagaatgtgaaaatgttgccagacaatgcacattacaatgaaaattataatcttatttttatttatatatatatatatttttgagacagagtttcactctgttgcctaggctggagtgaaatggcatgataattggctcactacaacctccatctcctgggttcaagcgattcttgtgactcagcctcccaagtagctgggattgcagaagcctgctaccatgtccagctaattattgtaatttttgtggagatggtgtttcacaatgtttcccaggctggtctcaaactccagacctcaggtgatctgctcacttcagttttccaaagtgccgggattacagtcatgagccactgtgcctggccataatcttaattttagaaactttatttttgaatgtatacattgaatgtgttttatgtataaaggataaaaaatagaataaatctttgtagctgatgagaatcatgctgtgattactttttatatatcataatatgaattatataatattatataatatgcattttaatacatcatcttgtgatgtgttttaattattaaagttgaatagccccactccaaatgatacatgtattggaacttcttttgcaacaatttccctatcttgtatttctgaaaatgtaatcaaatgatttagctaattcataactctttcaaagcacgttttaaaattaggaaatggtccgggcatggtggctcacacctgtaatcccagcactttgggaggccaaggtggttggatcacctgaaatcaggagttcgagaccaggctggtcaacatggcaaaaccccatctctactaaagagacaaaaattagtgaggcgtggtgcgcttgcctataatcccagctacttgggatgctgaggcaggagaatcacttgaacttgggaggcggaggttgcagtaagccgagattgcgccactgcactccagcctgggcgacagagtgacacttcatctcaaaaaaaaaaaaaaaaaaaaattagtaaatgataccaagctcaagccttggttttatttcatttgctttttcggaagcaacatacatcccaatataactcttaattgaaggtattttatgagaatgtatgaggctctttctgatggatggaaagcttaacaaatttgctcttctctagcctagtggcagaaaatttagataatagggttttttagttgtactgtagtattttttgctcattaacatccagtgaaatgatattgtctgcttatgttcagtagttgtggttacctagttattatggaagtgtttccacatttttatgaacaatttaaaaagtcatatattatggagcagaaaatattaattctgattacacagtatcctcgacattgatttctgtttttacctcctaaagaactgcacagtgaatccaaaagaaagtatactgaaaagagtgaaggatataggatacatctttaaagagaaatttgctaaagctgtgggacagggttgtgtcgaaattggatcacaggtaacttgaattcattgtaattcgtggtactatagagtaataatattaaaagcagcatctttccagttcgtataaatactctaacagtatttgtctagtagtataaaatactgtcagatactatatccctgctgcctgtgtatgctgctatttatgggtaactttatggaaaactacctcccaccccattataaaaactatgtaataaaggaacacatagccattgtagaaattttggaaaatacaactaagaaaaaaattgaaatctttgatattaaatttttgattttgctttgacttctacatgtatgactgttcatgtatgcatatcctaatgtgaatgggactatacatgccatttgtcagtgatattattgagtgatattatttcaggaaatctaaagctaatataataggtaagagtatgggccatggagtgacagccctgggtttatatttggttctaccattgttgatcttggacatgtcatttaacttctctgagattcaggttctatatttgctctgctttgttgtgtggcattaatgaggataatatacaaaaatatattggaaaactggagtccactgtacacatttatttcagtgtagtgaggttatattttgatgccatcagtgttttaaacattgatatttaatggttctttttgattctacagccatgcaccacttaacagggatatgttctgacaaatgcatcattaggcaattttgttgtgtgaacctggtagagtgtgtctgtacaaacctagatggtatagccgattgtacatctaagctgtatgatatagcctattcattcctaggctacaggcctctacagcatgtgtactgaatactgtaggtaatggtaacataatgtgttaccatttgtgtatctaaatatatccaaacatagaaaaggtaaagatatagtacaaaagataaaaaatggaacatttgcacagagcacttactatgaaaggagcttacaggattgaaagttgctctgaatgagtcagtgagtcgagtggcaagtgaatgtgaaggcctacaatattacctatgacatgactgtacactatcgtagactttataaatactacacttaggctaaactaatttcataaacattttttctttcttcagtagtaaattaaccatagctcactgtaacttttttactttataaatcttcagtttgtaagaaacttttgactcttataacacttagcttaaaacacaaacaccttatacagctgtacaaaaatattttctttctttataatccttattctgtacacttttttctatttaaaaattttttcaatttcataaagatttttgccaaaaacaaaggcaaacacacacattagcctaggcctacacaggatcaggattaacaataccactgtcttctgcctccaaattctgtcccaagtcttcagggacaataaaatgcatagagctgtcaactcctatgatgatgatgctatcttctggaatatctcctgaaggagctgcctgagggtgttttacatttaacttttttttttttttacaagtagaaggaggatgctctaaactaataaaaagtatagtataataaatacataaaccagtaacatgttcattattaagtattatgtactgtacataattgtatgtactatacttttatatgactggcagtgcaataggtttatttacatcagcatcatcacaaagatgtgagtaatgtaatgcattgcactacattacactaaacaataggaatttttcagctccattataatcttatgggactactgttagatatgcagtcagttattgaccaaaaacgttgttatgcggtgcatgattatatatgagatttttgctcttagtttggaaggaaataatatggtgtgtgtttatatttctaaaatttggttattctttcaaataatgggaactagttatttggctaaaacttcttgctcataaggtcagtttgatctgatttttgcctgtgtcagttttactaaatttatggacaaagactgtcctcttaatcctggacagctatcttgaaaatacatgtcctaggtcatgagaaatgttatataaggtacataaagtgcttaaaatagtactgggcacataacctatctttagtatgaatgatataaactgaaatggagttaaggaaatccaggtactggacctaccctcttgttaatttacttgggaatgttaatcaccacttaatacttaagttgtgagttttagacaagctagcttttgtgttgtcttggcggccatatttgtaagaagggtgagaagtatgttttaagaaaaggctttttaaaaaattttagtaattgtcagctgggtatagtggtacatgcctataatcccagcctcttgggaggccaaagcaggaggatctcttgagcccaggagtgtgaaggccagcctgggcaaaacagtgagactccatctcaaaaaaaaaaaaaaatttcataattgtgattttctaaaatagcaggctcttatttttctttttgtttgtttgtagcgatacaaacttggagttcgcttgtattaccgagtaatggaatccatgcttaaatcagtaagttaaaaacaatataaaaaaatttcagccgggcgcggtggctcacgcctgcaatcccagcactttgggaggccgaggtgggcagatcaggaggtcaaggcatcaagatcatcctggccaaaatggtgaaaccctgtctctactaaaagtacaaaaattagctgggcgtggtggtgtagacctgtagtcccagctacttggcaggctgaggcaggagaatcccttgaaccacggaggtggaggttgcagtgagccaagattgtgccatttcaccccagcctggcaacagagcaagacaccatctaaaaaaaaaaaaaaaaaaaaaaaaaattcaatgctgacacaaataaggtttcaattaaacaacttctttttttttttttaaattatctgtttcaggaagaagaacgattatccattcaaaattttaggtaaattttttacttttagtaaaaaatttttttctttttatagaagtaagtattttataatctttttttttttcctttagcaaacttctgaatgacaacatttttcatatgtctttattggcgtgcgctcttgaggttgtaatggccacatatagcagtaagttaaattttcataaataaacacttttgttcaatttaaagttaaaatgtggtgtgtttctttggtcgggggagagggatagtgtgaggttaaggagaaggaatgcttattttagatcactatatactgaagaatgtaattggtcattataagccatttaagaggcttatttgagttatttgaggccatcttggggataatatttcactaggcttctcttctgagtatactggtatactgaatccaaaaaaggtactttttgaaatccctccgaagacctttgagattgtagagtgccaaaggagtattcaagagtggcctctactgatatggaagcactgctgtaacctccatggttatgaaactaaagattgaagctagaatccactggataaacagaacaaaggccaattacaatgtttttaaaaacataaatgtatatcactttgcaaattatgttgcaaatgttaaaagaaagttttgcttgcagaaacaaaaggaacatttgtataaggatgcaaaacacagaaaaagaggaacttttagtttccttattagtaaacagataaggaaaactgtgaatcctcatttataaccaagaaatgcatattttaatgagataccattttgtaactaatgaaattagcagaatcttgaagaatctgtctatcctcttaccaaggattaatgagaattaaaatagatatgccaatggctgataagatactaaacctgttcctgatataagtttagggtatttaaatctttgaaaatttgagatcagctataagtcctttctctaggaaaaacacagatttgcatacactcaaaattggaaggctatttcctatgagtccgtagactccaaaataaaaaattctgctctaaataaaaatggtttaacctttctactgttttctttgtctgataataacttccaaaaaaatacctagctcaagggttaatatttcataaatagttacttttttttttcatttttaggaagtacatctcagaatcttgattctggaacagatttgtctttcccatggattctgaatgtgcttaatttaaaagcctttgatttttacaaagtgatcgaaagttttatcaaagcagaaggcaacttgacaagagaaatgataaaacatttagaacgatgtgaacatcgaatcatggaatcccttgcatggctctcagtaagtagctaaataattgaagaaattcattcatgtgcatatggctaacaaattattgttagtgagaggtgtttcttaacaaatctacctcaagaacaaatagggaatttaatgaataatgttatttcagtctatagcccaaggatcaagtggaatattagaatggagctttaatcgagcaccctaaaccatctaatacagcacagtgatttatttaagaatagcttttcttaaaacatgccactttaaaacaaaacggattttttttttatactttaagttctagggtacatgtgcacaacgtgcaggtttgttacatatgtatacatgtgccatattggtgtgctgcacccattaacttgtcatttacattagatatatctcctaatgctatccctccctcctctccctaccccatgacaggccccagtgtgtgatgttccccaccctgtgtccacgtgttattgttcatttcccacctatgagtgagaacatgcagtgtttggttttctgtcttggcaatagtttgctcagaatgatggtttccagcttcatccatgtccctacaaaggacatgaactcatccttttttatggctgcatagtatatatgtgccacatattccatggtatatatgtgccacattttcttactccagtctattattgttggacatttgggttgcttccaagtctttgctattgtgaatagtgccacaataaacatacgtgtgcatgtgtctttatagcagcatgatttataatcctttgggtatatacccagtaatgagatggctgggtcaaatgctatttttggttttagatccttgaggaatcgccacactgttgaactagtttacagtcccaccaacagtgtaaaagtgttcctatttcttcacatcctctccagcatctgttgtttcctgactttttaatgatcgccattctaactggtgtgagatggtatttcattgtggttttgatttgcatttctctgatggccagtgatgatgagcattttttcatgtgtcttttggctgcataaatgtcttcttttgagaagtgtctgttcatatctttcacccactttttgatggggttgattttttcttgtaaatttgtttgagttctttgtagattctggatattagccctttgtcagatgggtagattgtaaaagttttctcccattctgtaggttgcctgttcactctgatcgtagtttcttttgctgtgcagaagctctttagtttaattagatcccatttgtcaattttggcttttgttgctattgcttttggtgttttagtcatgaagtccttgcccatgccgatgtcctgaatggtattgcctaggttttcttctagggtttttatggttttaggtctaacatttaagtctttaatccatcttgaattaatttttgtataagatgtaaggaagggatccagtttcagctttctacatatggctggccagttttcccagcaccatttattaaatagggaatcctttctccatttcttgtttttgtcaggtttgtcaaagatcagatggttgtagatgtgtggtattatttctgagggccctgttctaaaccaaaacagaattctttaaagtatttagataatttatttaaagtacagttgttatatatttgaaaatgcaaatgtctgctcttaaattgtgagattatgctatttagattattaaaaagtgcatttttttcttgttaaatatagtaggattcattttttcccattattaaagtataaaaatgtatactattgttcaattataggtattggttcaatcaatataggggcacaaattatattgtctaggattctctttatagcattataactattgataaggcttttgttttaataaaagtggcaacttgaggttatgctcttcaaatcaacatagttggataatactttgtgaatcatcagttttgtaaattaatggtttcttttgaaactatgttgcatgctaagtatatatcttttaatttgtatcagtatatagaagtggtaattaaaaaattaagactttaggtatgccataatcctaatttgcacatgtaaccttagttttaatttccttacgttttgaatttttaatgactaagcgataatttatttcttagtgttttcttgtattgccatatagacagagtgaatagaggagagaaacatgggaaattgatagaagaatgttacactcctattattgaatttcataactacttatggaatgaatttacacttgataaggagtacttagaagaaaactttctgaatctgggtaattaagtgaaagtaaaaataaatagataagtaaataaaataagcacatagagtactttttaaaggcttatgtgtcctctcctcccagaaattgatattgagatattcctgtatcatctgaaagtgactattgttatttcttttagagaattaattttatttctatcaacacatatttattgaacatacgccatatgccttgaattgagagagatactgtgaagatacaaaaaagataaaggcttggaaaattgtggaggatgtaatagaaatttactgtttaaaaattgtttgtactcaagcctgtttagctcagttatttagggcttctaaacaatattcctttatttttgagaatttttggagaaaaagtgacaagccccaaatctggaaaagagtatgattgatttacaataggagatgtggaagtcataagcctctgaatttaaatattaaatgtagtatctctggcagatgaaactatagaggacttttatttagtcatatatttttagtgtttgagtcttatattacatttttaatcataaaaaccttgagtggtagtggataactttgtgaagataagttatgccacacaaacaggatactgtgtatttttcctgtgagaataattgacattatagagaagggatatggcatagatacatttgcgttttcacagacttttttttaaaatttgaaatataacacatattaagaaaagtatatatctcaagtgacagtttggtgaatttgtcacaaattgaacacatccgtgtaaacaacacccagataaaggcccagagcaagctttcatagtcttttgattctgtgtcataataaaaaattctcgttaaaactgtagattgataggaacatattcacacagagttgttgactgagggaaatttcaaatgaggtgctgcttacttctctcctgccaataatttaatgaaagaaagaacatcatcttatttttaatggttgtgtggggaactgggttcagcatttttgcttgacagccttgagataaaataaatccataaggaaaaagcccacttctgtttcttttcatcccagagagattaatgggcaatatatgagtgtaagatactggaaaagtctgttgagaaacctagtgaaatctcattctctgaaaagttgggggattacaggtgctatcgaatgcatcatacctaagggttagatgaaatgacttccaagagtttggccctattaaatctgttaagaggtttataatgccagcaggtgatgaaatgaaatttggatgccttagtttcagtattttcagaatttatcatattttttcaataaatgtttataaatcaaagtatgtcagatgctttattccctatatgatctgtctttcctggactattctggactcttcctattgatctctcatttgctaccttgagaccatttctctcacagcagccagagaaatctgctcataatgtaaatctcatcatgctaattcctcaggtaaaaaacctcctgtggaggacatattcatctggtaatgttggaagaagaccctaccatatggctttctgcaaaaaagaccactatactacctgtttggaatacaaaaagtaactgactgaaattactggacaggaagaacagatgctagttgagaaagagaagaggggagctgggagcctgaggagaaggcttttagtctagggctaagtgcagtaggtatagggaaggacagtaaggtagggcagggatgtcagtgggaaaactatgggtctcttcaccaggaaaactggaaaattgaagctagggaaaccttggccactgaagagagtggaagaatcctgcaagggaaagagccaagaaagggtacccagattctgtctgaaatctgaataattcctgtgtgtcacagactcagagcagccaaatgaagggcaaaagatctgaactgaaactggagttgctgcccaataaacagaacagttcaagttaagcaaagataattgcttcttacaacaaaaccattctcattttagaaaaataacagaatttaggatcttcacaatgtaacatttatgatgttcaggatacagttctaaaattatccagcatagaaagaaggtcaaagaaaccaaatgctggtttatagaataggagctttaggccaggtgtgtggtgcacacctaatcccagcattttgggaggctgaggtgggaggatcatttgagcccagaagttcaagaccagcctgggcaacaaagcaagaccccatctcttaaaaaaaaaaaaaaaaaagctaggtgtggtggcatggtggcatgttcctgtggtcctaggtacttgggaggctgaggcaacacagcgagactctgtctcaaaaaaataaaaaataaaaacaaaaaaactagaatgggagctttaagttaactttggttaggcattgctaaatgatggggatacattctaggaaatacttcatttaggcaactttgtcattgtgtgaacatcatagagtgtgcttacacaaacctaggtggtatagcctgctacacatcagggtaggaatagcctgttgcttctagactacagacctgtatggtatttttttttttaatctccactcttgagtatgtctttttaatattcaatgtgatgaaactgaagtatgtagaaagttgcataccaaagtatgatagctgtcttgaggaaaaatacttattttattggttgagttgtgaactgaacccgtcactcttttcgtgaaacacatgtgttacttgtaagactgataagcaattgtgtttatttatgcttgggtatgtggtagattcttgaaagtgaacaaagtgagcctgtcatttcaaagaaaacaactgacagtaaaggttgccaatgataaattttgtgttttcaagtaaaaattagaattttagaaacttgtatccaccactgaaagcttgacagagtcctaatatataaaatacttttctgatgaaatcggtggtgatatcaatgaatgtgagagatttgtaaacatttacaagaagtacataattcagtgaaccagtatttccaaatgaccaaatacatcgttataaaatcattcacgggtaagatattcattaaaagttcaagataaaccaatggattttaaagtcttaaaatacgaaaaatttatttcggttcattgagattgtttccagttccgccctgcaactaacctttaagaaactatgacttgtcgagttttggcgtagtgtcagaaaacagtaaccataattatctgaaaaggttattaaagtactcctcctctttccatatgaggccagatttttctttgtatacttcaacctaaacagcatattgcaacaaagtaaatgtagaagcggataggaaaattcagctctttgctgttatgccagatagtgaagacattcagaagatcataaaacagtgctattgttctatcttttttgttttgtagaatatggttatttttcattaaaaattatttatgttaacataatgggtttattaagataaatatttttaaattttctcaagttcttttgagccctcaacatcctttaatgtaaaaaagctattagctactttatgcttcctaatggaagaatatataaccaccttgaaaacatgatgttgaaagaagccagtcacagaaaaccacatattgtataaattcatttatatgaaatgtccacaagaggcaattcagtagagataggaagtagattattggttttctaaggctggtggggaggactaggtgttttgaggatgatggctagagagtatggtttttctttttgagataatgaaaatgttgtaaaattgactcattattgtagtcaattttataacacttttatcatctctgtgaatatactaaaaactattgaattgtacacattaaatgggtgaattgtataggatgtaattttttaaatttctgttttaattaaattttaactaaattaagttttaattactaacaaagtaaatattaatagatttaacccacacaaacaaaagcttttggggtccttagtaattttaagaatataaaagggttttgagtccaaaaagtttgagaacccttgcctgtattctcttccccactcagacttgtctttcactcacacaaccatgtttgtttttgcctgtccctgagtcttgaaatgctttcctctgcctttttcttgaccagattttaaggtccattttgcctttcctgatcatcctagtctatagtcattcttccctcatttagtcttaaattgtttattatctatatacttaactagtcatttataaactttgttttactatatgtgcatatctcatgttaaattcatgtaaagtacttaaaacaatatctgacattgtattataaaatgtagcagttaattacataagggtaaagaacagagaggagtcaacttatgatgacatgcaggtttctggcttgtataacttaagtggatagtagtgtcattcattaaaataagatacctaggattgaatgaggtttgcttgggaagatgaatttcatttgatgagttttaagtaattataggtcatttcaatagaggtgtcaagtagcagttggatatgtgtgtctggaacttaggaaagaaatctaggctaagattatggaccataaaaaatgccacccttttttgacagtttatcttgtgccaggcactttggtgagcacttcttaaatttaattttcatcataatccatgaggtagtttaccctagatcaggaaatgaatgcttagaaaagtttaataacttgccctagaccacacaagcaaaatggcaagatctgtgatttgaacccaggtctttctggctccaaagctattaatccttatgctttgctgagtaactgaagtttggagaagggataagatcacttaaggggagaatatagtatgagaagagaaggaggctaaagatagaattctaaggagctctaacatttaaaggatggacagaaaagagaagcctgtgcctacaaaagagattgaaatagaacagccaggaagataagaagaaaatcaggagaagtggtatcatagagagaccgaccaggtgcaatggctcccgcctgtaatcccagcactttgggaggctgaggcaggtggatcacttgaggccaggagttcgagactagcctgaccaacatgacaaaaccctgtctctactaaaaatacaaaaattagctgggcctggtggtgaatgcctgtaattctagctactcgggaggctgaggcatgagaatcgcttgagcccgggaggcggaggttgagtgagccaagattgtgccactgcactccagcctcagtgacagagcaagactctgtctcaaaaataaaataaaataaaattaaattaaattaaaaactgaaaaaaaggaaaaggagagagagaacattacaaagtctgagtgagtgcttgctcactcagacttttcagataggagctgaaaagttttagcaacaatgaagtcactggtgacagtgacaaggactgttaaatgaaggggtggggataggatgagatctgaatgagagataaagtggacacagtcaaatagatggcttttatcaaaagttttgcctgtgaagagaaataaagatataacagaagtaaagatacagcttgatgtatgtgaagtagagggaatataaacatattttttaaatcagaaaggtagggtttaaatattgatggaaaagagccattagaagtgttctctattgctggataacaaattagtggctttaaacaaatattttattttgcttatgattttttgggtcaggaatttgggttgaacttgactgggtggtttgcctccgactatgtgtcagcaggtgcctggagctatagggtccacttccaagatgcttcttcactcacaggtctggcatcttaccgctccttggtgcacactcagctctcttcctcccatcctccctccctagagtggttagaatgttaagctttggagttttcacctgcagagagaagataggagattcatagtgaaagtagaggttttaagaaacaggatatttggcagggtgcagtgtctcacacctgtaatcccagcactttgggaagccaaggtgagaggattgcttgagcccgagttcaagaccagccttggcaacatagggagaccctgtctctacagataatttttaaaattagccaggtgtggtggcacacacctgtggttcttgggaggctgaactgggagaattgcctgagcctgggatgttaaggctgcagtgagctgtgattgcaccacagcacaccagcctgggtggtagaatgagatcctgcctcaaaaacaaacaaaacaagcaaacaaccccaaaacaaacaaacaaaaagtaacaggatatttcattaaataattcattcattaaataatgaagttgaacgtaatgaatttaatgaagtttaataggtgtagtgggagtaacaatgagaatgaaagtgtaggaggttgtagtcaaagagttgtttcaccttagaatttctggagacagaacatttctgggtagtttactgtattttaagaaatgatcttgggagtgcatgaggatcctggccaaggagccagaaagtacagtgagcaagagtccaggacatgtagcaaggaggaatgtgactgaaataaagactaatgtcttcagtgcttgaggggagtaaccaggagacaagtgggactaaatggggcagagggctagagaggtcctgaaagcaaaactcctggctcacttaaaaaaaaactaatctctctctcaatacctaatctaatgtctaacatatagaatttaggtgcataaagcattagatttgtaatgtcctttgatgaatttacccctttaatcattataaaatgaccctctctttatccctcgtaatattgtttgctctgaaaactacttgtgcctgatactagtgaagccattccagctttcttcccattaatatcaacatggcatattttccccattctttatttaacttatacgtgtctttattcttaaagaagtgattttcttataggcagcatattgttgggtgttgctttcttaaatcttgcctaacagtatctgccttttaattgggatgtttagatttaaatttaatgtgactattgatatggttgggtttaaattctccatcttattattcattttctatttgtctcatctcccttttcctccctttcctctttttctgccttcttttggattgaatttttaaaattctgttttatcttctttgtaggcttactgtctatacttctttattttgtaattgttttttgatttataatatgaatctttaatctttaatagtctttctttaaatagtattacactacttcacatacagtataagaatcttagaatagtatatttccattttcccttttccaacctttgggctgttgttgtcatacattttgcttcgacagaagttataagctctacaatacactcataacttttgttttaaaccaattatctcttaaagagaattcaaaacaagagaaaaaagatgtttttatttgattacatatttacctttccagtactcttcattccttgtgtagatccagattccttttgttttccttctgactgtaaaactttttttggccaggggcagtggctcatacccgtaatcccaacacttagtggggctgaggcgggaggatctcttgaagccaggagttcaaaaccagcctaggcaacaaagcaaaactctgtctctattcttataaaacaaacaaaaagcatttctattttttttttctttttgagatggagtctctctctgtcacccaggctggagtgcagtggcgcgatcttggctcactgcaacctccacctcctgggttcaagcgattctcctgcctcagcctcctgagtagctgggattacaggcacacgccaccatgcctagctaatttttatatttttagtagagaaagggtttcaccatgttgatcaggctggtctcgaactcctgacctcgtgatttgcctgcctcggcctcctcccaaagggctgggattactggcatgagccaccgcacccagccaacaaaaaacatttcttgtgtgcatgtctactagtgatgaattcttccagcttttatgtctggaaaaaaacattttacctttatttttaaaaggtcttttgctgggtattgaattctaggttgacagtctttttgttttttctttgagtgctttaaaaatattgctccactgtcttctggtttgccttgtttctttttttcttttttttgagatgaagcctcgctcttttgcccaggctggagtgcagtggcatgatcccagctcactgcaacctctgcctcccaggttcaagcgattcttctgcctcagcctcctgagtgactgggactaaaggcacatgccaccatgcccggctaatttttgtatttttagtaaagatggggtttcaccatgctggccaggctggtctcgaactcctgatctcaggtgacccacccaccttggcttcccaaagtgctgggattacaagcatgagccaccacgcctggccttgttctttttttgctgtatctttttcctgcaggtttttctttctgtatttcatgttgaataccttctaaagctatgtcttcaagtttattaatttttttcttctgaggtatctaatctgctattaatctcatttattgtatttttagtcttactatagttttcatttctagaaatttgatttgggtcctttttatatcttccatatctatttttattatgtttatgcttttctttaccttcttgaacatatgggatataggtattataactttttaaatgtccctgttactaagtctagtacctatgtctttttaggtctgtttctcttgactgatagttctctctctctcttttttttaagagtcgtatgtttctgcttttttgactgcttggtgatttttttgttaggtgccagatatcatgaattttgctttagtgggtcctggatatttttgtattcctttcactattttgacctgtgttttggaacacaattaaattatctggaaataatttgacttttttaaggcttcatttatttatttatctggtttttgtttttggacacagagcagtctttaatcaatagccgattttccttcactatccaggcattgctcttctgagtactctactgaatatcccatatatgacaaggtttttccactctggctagtggaaagcagaactcttcctgaccctgtgtcagctcctggaaggattctactccttcccatggttcttccctggttttgagtagtatcatcacatccatgcactgatcagtactcagctgaagactcaagcttaaccctctgcagacctctggagttctctttttgtagctttcttctctctagtattctgtcctgctaattttagtttgccttggcatctcccatttcttaactctgtttcttcaactgggggaccactgggctgcattccagtttctcatctctggactgtggaccataaactgtccccaggcagtaagctgtggcaataatgaggctcaccatttgttttccttctcccagggattgctgttctgtactgcctgttgtttattgtgtaaaaagaattcttttatttatgttgttcaattttgtggttgtttaaacgaatctggtccctgtttcttcatcagagctggcagggttactaaacgtaaggcttagtgattgatgaagtatttacaaatatgaaatatgtacacttacagaatatttagggtatcatttccgcttccttgtgttaaatgcatcaggtcttctgactgatgcattatactgtttcagaggggtgcttactatatggagaacatagaagtactagttattaactatttttttgtattaaattttggtacgtcacataaacattgagtctcctttaaatgtgtcaaatgtagctgacttactaattggattctgtcatactctttttctgtggtcaccaaatattagcaaatttcttcattcagttacacaagtacttggccaacatacttttacataagaaaatacttaggatgggctggcaagatagccaaataggaacagctctggtctgcagctgccagcgagatcaacccagaaggcaggtgatttctccatttccaactgaggtacctggctcatctcattgggactggttagacagtggatgcagcccacggagggcaagctgaagcaggatggggcatcacctcacccgggaagcacaaggggttggggaactccctcccctagccaagggaagctgtgacagactgtgtcatgaggaacattgcattccagcccagatactatgcttttcccacagtcttcgcaacccacagaccaggagattccctcgggtgcctacaccaccagggccctgggtttcaagcacaaaactgggcagctgtttgggcagataccgagctagctgtaggagttttctttcgtactccagtggtgcctggaatgacagcgagttagaaccattcactcccccggaaagggggctgaagccagggagccaagtggtctacctcagcggatcccacccccatggagccaagcaagctaagatccactggcttgaaattctcgctgccatcacagcagtctgaggtcgacctgggatggtagagctaggtagggggaggggcatcccccattactgaggcttgagttttcccctcacagtgtaaacaaagccaccaggaagttcagactgggcagagcctaccacagctccctaaatccgctgtagccagactgcctttctagattcctcctctctgggcagggcatctctgaaagaaaggcagcagccccagtcaggggcctatagataaaactcccatctacctgggacagagcacgtgggggaaggcgcagctgtggacacatcttcagcagacttaaacattcctgcctgctggctctgaagagagcagcagatctcccagcacagtgctcaagctctgctaagggacagactgtctcctcaagtgggtccctgacccctgtgcctcctgactgggaaacacctcctggcaggaatcaacagacacctcatacaggagagttccagctgccatctggtgggtacccctctgggacgaagcttccagaggaaggaacaggcagcaatctttgctcttctgcaacctccactggtgatatccaggcaaacagggtctggagtggacctccagcaaactccagcacacctgcagcagaggggcctgactgttagaaggagaactaacaaacagaaatgaatagcatcaacatcaacaaaaaggacgtccacacagaaaccccatttgaaggtcaccaacatcaaagaccaaaggtagataaatccatgaagatgaggaaaaaccagcacaaaaaggctgaaaattccaaaaaccagagcgccttttctcttccaaagaatgacaactcctccccagcaaggggagtttgacgaattgacagaagtaggcttcagaaggtgggtaataacaaactcctccgagctaaaggaccatgttctaacccaatgcaaggaagctaagaactttgaaaaaaggttagaggaattgctaactagaataaccagtttagagaagaacataaatgacctgacggaactgaaaaaacacaacatgaggactttgtgaagcatacacaagtaccaatagctgaatcgatcaagcagaaaaaaaggatatcagagattgaagatcagcttaatgaaataaagcgtgatgacaagattagagaaaaaagaatgaaaaggaatgaacaaagcctccaagaaataggggactatgtgaaaagaccaaacctatgtttgattggtgtacctgaaagtgacagggagagtggaaccaagttagaaaacactctacaggatattatccaagagaacatccccaacccaacaaaacaggccaacattcaaattcaggaaatacagggaacaccacaaagatactcctcaagaagaggaaccccaggacatataatcgtcagattcaccaaggttgaaatgaaggaaaaaatattaagagcagccactgctcaaggaaataagagagggcacaaacaaatggcaaaacattccatgctcatggatgggaaaaattatagcgtgaaaatggccatactgcccacagtaatttatagattcaatgctatccccatcaagctacctttggctttcttcacagaattagaaaaaactactttaaattttatatagaacctaaaaagagcccatatagccgagacaatcttaagcaaaaagaacaaagctggaggcatcacgctacttgacttcaaactatactacaaggccacaataatcaaaacagcatggtactggtaccaaaaaagataaataaaccaacggaacagaacagagacctcagaaataatgccacacatctacaaccatctgatctttgacaaacttgacaaaaacaaccaatggggaaaggattccctatttaataaatgatattgggaaaactgactagccatatgcagaaaactgaaactggaccccttccttacaccttatacaaaaattaactcaaaatggattaaagacttaaacataacacctaaaaccataaaaaccctagaagaaaacctaggcaataccattcaggacataggcatgggcaaagacttcatgaccaaaacaccaaaagcaatggcaacaaaagccaaaattgacgaatgggatctaattaaactaaagagcttctgcacagcaaaagaaactatcttcagagtgaacaggcaacctacagaatgggagaaaatttttgcaatgtatccatctgacaaagggctaaagtccagaatctacaaggaacttaaacaaatttacaggaaaacaaacaaccctatcaaaaagtgggtgaaggatatgaacagacacttctcaaaagaagatatttatgtggccaacaaacatatgaaaaaaagctcatcaccactggtcattagagaaatgcaaatcaaaaccacagtgagataccatctcatgccagttagaatggtgatcattaaaaagtcaggaaacaacagatgctggagaggctgtggagtaataggaatggttttatactgttggtggcagtgtaaattagttcaaccattgtggaagacagtgtggcgattccttaaggatctagagccagaaataatatttgacccagtaatcccattactgagcatatacccaaaggattataaatcattctactaaaaagaacatgcacacatatgtttattgcagcactattcacaatagcaaagacttgaaaccaacccaaatgcccatcagtggtagactggataaagaaaatgtggcacatatacaccatggaacactatgcagccataaaaaaggatgagttcgtgtcctttgcagggacatggatgaagctggaaaccatcattctcagcaaactaaccaggaagagaaaaccaaacaacacatgttttcacttataagttaaaactgaacagtgagaacacatggacacatggaggggaacatcacacaccggggcctgtcagggggtgcgggtctaagggagggatagcattaggaaaaatacctaatgtagatgatgggttgataggtgcagcaaaccaccatggcacgcgtatacctatgtaacaaacctgcacattctgcacatgtatcctagaacttaaagtataataaaaaaacagaaaatatttaaaatatatctttcaaattatcttttcaaatttaaatcgagggtcattttatgtatgagtataatttgtaatgaatagcccatagttttagagtcctgattcattgacaaacttataaacaaaattttaagcttttttggtattcttttgaaatgtcaaaattgatgggaagcaaacacaaaagggagaacagtctgtggctctgaaaaaaccaaaaaggatatctgttgtatgtttgtatggtgggtcattaacctttggtgtactttgcagaagtattttaagtatttaccattggacattatttgttttaagttatattttgctgagagctacaactcaggaaggcaagtgaattgtaagataacgattaagccacatttaacactttttaaaagcatgggccaggacaatgaagcagtatgatgccatatatacttttacacaacagccatgctaatataatgataaagcaattatgctatatttttaaaagcttctcatgaattacctaaaataaccatgtatttacttttctttgccagaaagaggaaacattttattttaattttaaaaaattcaattctgaaaacatagctaaagctttaacctttctcactctgacccaatgtattcctaatatagctttgcccttgacttccacagctaaatactagtttctcaagtgatttaggagacttgacttcattattcaaaactgaaattatttagcttgttctaaatgcaactttgcttcccactatgtctatttttccattacttttcaaatcatctgggcttaaatactgagcattttctccttttctttctcaatagtttgatagagtcctgtaatttttttttaaagctgtctctcatatttattatattattattttaatatacttcattacacttccctagaacagatcatcagctctctttaagtaatttgtctgaggtcacccagttggcatttgaactcatattggtttgattccaaattccatactggtttctagtaaaggtctctgtcactgtactacattatttctgtgaaatcattcatgctgtttttactacctctataatatatagtcaggcatatgggacagtataaagggagcaatacaaatagtaagttaattttattctaagtgaaagcataatatgtatgtgtattttttatcctgagtaacaagggaagtgttttgcctaggagctaataagtaacaagaaagggaaaagtaacatttgttgactagctcctttgtgcagtgcactgtgactattggtctgacttattcctcaggaagaaggattaaaagaagactttacaaaaatgagcaaactatattataaaagtaaatgctagtatgcatatatgtttcattcatgcaactcctagaaatgagaatttactataagtgttttcagaatccacaataatttaggttgaaattaggtatttggatcaactttcaagggaaggggtgagaatgaggtgaaatagacatctagattgttttcgtagactgaaacattggacctgaggtttttgttgttgttttactctttctctgtttttagtaaaagattccaggtatgcctaaagtcatcttctatacgaatgcaaaaatgtaacgacaaagaagggaaaataaaagaaggcaatatcttaggaataaatattttatagtgacattatttttctgctagtgaactaataatctacaaaaattttaagatagataagcagaaagaatacaaacaaaaaaagatagtaatttaactcatatgaataatcatccactgaaatgtagcaaggatatgctacatatgaaatgtaattagatgattgcttaaagatctaggaatataagctcaatgtaataaaataactttcttcatcattgttaaggattaataaggcattaaatgggttttcatgtgggtcctcatatgttaaaaaggacaacaataagaaaatctaaagaaactgagataacttataaatcaatgcaggtattctgtgttaaatgcttatgtaagcctgagttcttcatccagatctgtttatgattttaaacataaaatcattttcatttctaaacctttgctcaagtaacttgtagtacctgagtcctatgtctgatccctaagtctattcttttctctatgtatctatacccttctttaattttaaaacactctgacatatgaaaaaatgccagagtttactgtagagaaatattcataacttgtctattcatgtcactcctccccaccacaccatccatattatacacattacccattctctttgttcattaattggcaaaagggactaagaaattcaaggatgtccaaaaataaaaaacaaacaaaaatctaacaactcaggaatgtcctgtaggtagctcatagaaacttagtttaggaagtagtgctcatcacttgcttacttctttggaagtttgtctgataattatacagaccagcatcaaaataactctcatttatgtgtgtgacatttcagtgtagaagtaataataggtaatgtttttgcatatgtcctattataggtactgttaaaagtgcttcagtgtattaactcataacttctcacaactctatgaaatagattctgtcatcactgtttcacagatggagaaactttcctgtgtccacaaaactggttggtgacagagccagaattttaactcaggctatctggttccagagactatacttttagcctctatgttgccttttagtgtatattagtttactgtttggtatgtgcattgtcatgattcgtttatttgctcatgttttatctgtgtttgtatttttgtgtttgtgagtgttactatgctatggcaaaaagggcctagactttgaattagcggatcttacttaatattcacagaagcctggaagtgtaaacactgctatccctattttatagataaagagacctgaggtccagagatgtcatgtaacttgctttggtgtggttctgaacaaattatgtctctgtatctcaggtttccttgtatgtaaaatagggataactttcagttgttgtgaggaataaatgagcatttatgagaatagtaattagaaacataacaattaattgttagtacccttcattccttttcctctgctatacagtgatttcataagaacagagaaccgaggattcagttacacagtattaacctgtttatcttggcttactataagtacagagaatttttctcttctcttgaggcacccctcctcccccatcaccttctcaaaatggaaaaagttcagggggaaaaggcatcatgggactccagcattgttaagtatgggcagtgttcactgttatattacagttggaatttgttatgttgctttagttatgaatcatgtcagtaattaccctgagggtggtgttagttcactattcaagtacaaacaagaagggaagtagcaatggtagaagaatagctaggacatactctctgtacctaacctgtgggatggaagcacatatactcttattcagagaattttataaagagtcatgatgttagataattacttgaatttagttttagaattttcagtttgtaaacttacagtcaaatcttaactggaattgtgaggaagggctctagaattctggatatgcaagaaacaaagaagagaaataggagaaatcgatcctaattagtgtggcttctgaatttctgcagcaaaataaaaggctgttattaattattgagtttactaaaattttagaactactctaaggcaattatgcttcaatcatctaagcttacttacctttaattataaaatagaacaactttttggcatttcatttttccaactatttatagcatgttttaaaaactctgaactgtcacgacccagtctgtttcaacatacacatttgtggtccttggtgttgttactaatttacttaattggttcttcatattttcagcttttctcagaaatggccaaatatcaaaggtatttttggtgtcttcctgtaagtgctagatttagaacatgataaggaaacgtagaataggaaacagctggatttgtttcttagccttttcaaaaaagccttttcttactttgctaagtttcagtggttcttatctccactaaatataacaacaaatttatctttaagattttgattatattccttaagaattcttcaaagactaacataaatctgtcttgctatcttttaagtctggtcattttatcattatgcccttttcttattttaagataatttaattgtctaaaagtttttaaatttacatattaagtaatgatagtttttatattaggttttatcatttagtttttttcttttaaacattaagatgaaaaaggtggagaagtgaaattacttgtcttttacatgagtcataaacaaaaatgaacataggatacactaatccaatactgaacttactatctgttcttgaaaatataatttttttgcattatctttttcataggaatatcagacacctttaatagtgtacacttttagattggcatctgatttagttgaacccacatattttaacggggtcttctgaaaataaacgtttgcacatttcagttccaatgaagaacaaatggcctggggaagggatggagagtggtaaagaaatcccttgtagaaaaccttttttttttttttttttttttaaacagatgagtctcactctgttttcccaggctggagtgcaatgacacaatcatagctcactgaagccttgaactcttgggctcaagtgatcctcccacctcagcctccttagtagatgtgactacaggtgtgagccaacacacccagctaattttttttattctttgtagagacggggtcttgctgttgcccaggctggtctcaaactcctagactcaagtgatcctattgctttggcttcccaaagtgctgggattagtcatgagctgccactcttggcctacagaaactatttatatgtgtcctttgctttatttttctttaagtgcaggtccattttttcccctcgttttaggtagctaagattatattgaatcatgtgtgtttcagtctttgtcatctcaggaagtcttatgagaccacaacataaagtatagtaatttttgtccaataattttggccattagcaaaaattacctatatgacatataaatcaaatggtataattttttagtgctaagtcttaagtagtattcatttttatttaaataaattgcttctgttcgtaaagtactatatataaaacctttttaccttttttatatataaaacctatgattcataggttttatgtcctattaaaatatgagctaacaataattggtaaaattagttggaaaattatcagttttaaaagaaaattaaattgaaggttatgttgttagtaatttaaagatctcctgtgttttgatgtaaaaacactattttttagcagcagtcaaagggcttaagtagtatgactttttgtgtaacttggattgtgcaattgcttttaaaaatgaaactatttctcatttataatgagataatggaactcagtgtatcggaagagcagactgaacacacacttctacctcctttctccccgcaaaccctacagaagtgacaaaaaagacacatatcacaggggagtgaaacccagcagtactcagactgtgaagcagaaaaactgtggagggaagtggaggagttgattcttttttttagtataaaaaataaatgatgagtgtattgtggatacaataaagtagagaaaaccacagcacaccacacccccaggaaaggggactggtggaagtgggagtcttagagagcccccaagctcaaagtagcagatacagagagtggggcaataatcaggaaggttttctaaagtgctgtttggcaatggtcctcaaacttgagcatgcatcaaaattaccaggagggcttgttaaaacacatattacagattgctgggcccagtcacaaagtttccagtgtagggtccaagaatttgtatttctgatatgtttccaggtgatactgatgctgctggtctgggtactacactttgtgagcaacattttaagaacatgaaacacctggaccagtcccccatctaaggccatgccagcctatgagaataaaaaaaatgcacctctgtagtcccagctacttgggaggctgaggagggaggattgcttgagcctgggaagttgaggctgcagggagccgtgactgcactactgcattccagtctgggtgacagaatgagacactgtctcaaagaaaagcgaaaaaaaagcaccttcctctttactaatggattataaaaagatgccgtccggacacagcaaccctaagcttggtatgcagagtttaggctgaagccccatgctgttgtgcagtgcataaactgtacagatacaagcccgcgcccaccttcaaattttgtgtacacttacagacacggggctagggtttcctgatggtgccaaagagagaagcagaacagaaattgaagtaaaccgagacttctgtaacagacctaaagaaaaagaaataggaaaggcagttcttcctaggaggaaaatacaacaaagtattgtactggtaggttatgtagttccttactttggtattttcaggtacctcagttcaatatttattcattaccataagaaagaccagaggaaatggaggagagaaaataataaaaaagaacagaaaaaaaaattccaaaactaatgaaaaccagggggcttcagatggaaagggcccatagtgccaagcatgatgaatgaatgtggatactttttgtttttttttaatgacagtctcgctctgtcgcccaggctggagagcaatggtgtgatctccgctcactgcaaccgctgcctcctaggttcaaacgattctcctgccttagcctcctgagtagctgggattacaggcacgagacaacgcgcccagataatttttgtatttttagtagagacgggttttcaccatgttggttagcctgatcttaaactcctgacatcgtgatccgcctgcctcggcctcccaaagtgctggaattataggtgtgagccaccccacccagcaaaaaattcagaattctaaagataatgagaaaattataaaagcttccagagagaaaaagtaagctattttaggggaatgagatccagatcagcacagaagttctcattaggaatactggatattttataacctaaaatttgtcaaatatgacagcaaaatgaaatttggaaatgcaaggactcagaatgtttatcttttgactgcccttttgaaatgaaattactagggaatatgctttaaaaaaatgaaaaaagaatccacaaaagggaaatcataagacctaataaaaaaactgtcacaccagagcagagagaaaaatgcaaaaaatcctacgatgcaacaagcccagaaaatgtttgttccacatgagaaatcagatagtttcataaagaatgccttcaacaacaaaatggtttcttttaacaattgtataacctcatctaaatggtgggaatttaacaaatacagtttaaagttgataaatcaagtaataagagtaataatgaatttgtgtattaacaaaagaaaatttgccttttttcctcgggcttttgaagaattttaagattcattctaattattgagaccaattatgtgccagacactaaaataaatgaagttctagggtgtttttctcccatccttgttggcccatagttttgactgcatataacaggagatggcatgcacagcccacagaccataaattttgttttaacacagccgctttattcatttatatattgtctgtggctgcttttgcactgcagtacagagctgagaagttgcagccagaaagtagagcctgcaaaccgaaaatatttactatctactccttgagaagaaagtttgtcaatacccaatataaagcattaacatgtttcccaaagtcgtaactatacaaaaaggtataatctgaaaaatgtcatattctttgatattccttctatcctatttccaaccccacccttgttttttggtttatctttcctgtgtttctttttataaaaataagcaggtatgcacgttttattttgcctttttcttatacaaaaggtggcatactatgtgtgctcttttatgctttttttcatttaacactaccttcttgaagtcattccatatcaatttatagagatatttctcattattacagctgcatagtactgtattttgtatatatactacagtctgttcaactagttttctatgattggacatctaggtggtttccagtattttgcaatttcaactattaccacaataaataactctgtgtgtgtgtgtgtgtatgtatgtatgtatgtgtgtgttatgtaattgaaattgtgtcttgaggatcaatacctagaagtaagaatgctgggtcaaagggttaatgtgtgtgtgtatgtgtgtgttagatattgccaaatcccatccataaggtttgtactatttttcattcccaccagaaatgtatgaaggtagcaatttctccatgacggccactgtccaaattttgccaagtaatgacattaaaatattcttctcatctattatcaccatcatttaaaaaagaatttctcccattttaataaaggaaaaaggacaaatcagaaaaaaaggataagaagagccctttaaattgtataaatatagttcttgttgtgattatttttcttttcttgctgaagacaaatgcatctctaccctgtatcagacgaatctttatttgatcatgtctcccctaccttgaaattcttgaggactttccacagcttctcagcacttaacgtggtcttaacatggcatataagtacgtgtaagatgttagccctatttctccagccactttgaatgttttaattctttcagtatccaaattctctcccacagggcctttgcctgtggtgcttgccttgccaccattaagtaactagacaagtaaaaacaaagaatctgggttcagccaggtgcagtggcctgcacctgtagtcccagctgcttgagaggctgaggtgggaagattgcttgagcccaggtattcaagtccagcctgggcaatatagcaagacctcatctttctattaaaacaaacaaacaaacaaacagggttcttaccctggcgctacattaatttgttatgtgacattgtgtctgttgtttagtcttacagttcctcagtttccccagcctaaggtgtagttacatcagatgaccatcaggccctttctgttctaagttgtgaatgttccagaagccattttgataggacgataatggaacctagcacatttaccccatggctattaactgtaacgctgctgtaagtatacaacacataattgtttcttacaattatttatttttaaaaatcacttgaaatctattatgagtaaaccaagttttgagaaaactgattattaaatttttgaattataccccttctggggctctatcttttgaattctgtttttaacactgcttttccaatgaaagaggtaattttctacccttttaagaggttattgtagtaaatcttttgggagcaggaagacaggaaggtaggagaggcttaacactatcattttaaggtaataaaaaagagagagaagtttgcctggtgttaatctcctgttcatttattatctgatctgttgccttgtttaattgacattctttgtacttttataaaactgtctgacatcaagtaaaaatgataaagagaaaatagaaatttgagaattagagattttaggagttatgtacatgctgatctctggaaaatattgctaaataagtaatgctgttgatcattaagtactctggtcggtttagatattaatgtgtgttctacattcttaagtttgttcattagtcctttttaatttgtaatttatttcttagaagccatgttataaatgggtaattcagttttcaggaaagccccaaaaagctttttaaaaagtttgtttttggagtctttaagatttcatccctgcctaagcactgtttataaaattgtttctacacaaaaatttattcacaactaagaacatttgtgacatccagagttggactggcatttaggcacgaaaaaagtttaggtgctggaaggtagtgatgcttcttcttggaaatagtaatttaatatattgacaaaggacaaaatacttggttcatcaggtgtccaaaattgtaggaccaaaaagcaattgcttcagattcttgataactatgtaccattcatgaaccaaatgtttctcggatgggaatatgaagtttgctccattttctattttatatttctcaatttagtgactaatttctttaaataccaatatctataattaagatttctatttccaatttacttttcagcattttgaatgtagaatattaaggttcattgatagctccttaagtagtgtcttcagtttaattttctgtgaatataatatatataatacatatatttttatgctttttaaaataaactaggtacttgatattttctcagtaaagatgatttctaagttcagaaattattaggatgctggaaagccatttttccacacctgaaaaattttctcagcttactgtgttcctttgaagggagttaatgtgggaaggaagattagtcaaatcatctaccgttttatgaaaatgttaataacagtgggcacagtttttataggggggcttagtgctatcattttcaggtaatcaaaagtaaaatcatcagagttctaatattaatataggtttttctgaataaagggggaagggaagagaaaaccctcagaatatatgacttaccacaaagtacaacactagcaaaggaaaataaattttgttctggtacactttttttccatagttctagatgagaaaaccatgtttgttatctgttatgtattgctttatgaagaatcttacaaaacttttgattcatttatcttcctgttgacaagagacaccaaaaagtttctttatgaacatagtaataacaactatttaatgactgttttacttgcattttaaagttatattcatgttttatgatcttgccttaagttgagatctttaagctgaggagagttctgagaaatctcaaagttatacaattctccacccctttcccccagatcagtagattggtagttgcttctcaactcagtatgtttaagaaagagtgtatttttatttactgaagtgtaatatcaaataaaggaatttcaggtcaatggaagaaaacacatttatattatgtatatatttctcttgggatataaaggaccatggttagtatcttcactagttttttgggttttttttcttttctcttttttttttttttttgagataggatcttgctctgttgtccatgctggagtacagtggtgtgatcatatctcactctaacttggaactcctgggctgaaggcattaaagatgtattttgctttaggtttatctaaaggaaaccatggatccctaaagaaaaccccccactgttattttattgaaaatgggtttacctgtctagcaaatgattgtgatttttctgaaatcattacacctcaaacccagagaacagcaaaaatcaaatttatgtcttaaaagagttttttgtccaagttgtattgaggacttgaaagattaagacagtagaaatcagataggttggatgctgaatttaattacatgtccttttccttaaatagaaggcattcttttttagttaactttggagaactgcttgattttttttttttttttttttttttttgagatggagtctcgctctgtcgcccggctggagtgcagtggcgagatcttggctcactgcaacctctgactcctgggttcaagcgattctcctgcctctgcctcccgagtagctgggactacaggcatgtgccaccacacccagctaatttttgtatttttagtagagacggggtttcaccatgttggccaggagggtcttgatctcttgaccttatgatccacccgcctcagccacccaaagtgctaggattacaggtgtgaaccaccgtgcccggcctgaatttttttaaaaaaggaatatgttggataataaaaaagttttagtgtacttggtactttttttctaaagtatacctcagagccagacctattttatgtttagtgaaatgaaaatatagttttgtttagttatttggccttgtagttttgttactttataatgtaaggaactgtgtccttaattaatcattttgacgtacaataacatcttgcctacttgaaataatgttttgaacttcccaatatttggcttaaaatggccagaagagtgaaggaaaagaaaatatttacagtcatgcatcacgtaatagcattttggtcaatgaccgcataaacgatggtggtctcataagattatcatactatatttttactgtaccttttctgtgttgagatgtatttagatacacaagtaccattattttacagttgcctacagtattctttgcagtagcatgctgtataggtttgtagcctagaagcagtagggtgtaccatataagcctaggtgtgtaatagtgtataccttctagagttgtgtaagtacacactgtgatgtttgcacgacataattacctaagcaagcatcataagcaacacgtgacagtatattactttctaaatgccaagtactatatttcactatctctgatgtttctccgacctaacatacttaaaacataagttcttgactgtgatgtaagtgcacctttaaaatgtacctctggtagtattttatttttttgctaagtaaaaacttagcaaaatgacattttattagttttctccctctcaatttttgtggcatatatcattttgaaattgggtgcattatatacagaaaatcaaaatagtaacttcaaagcataccatatagatagcatctgctttctacaaattgcctacacagaccaaactcccaaaatgttatcaatgtgttactgctcaagatcttccaacaatgttaatatgtcatcatttctacagaagactacgtttttagttatacatatattttaaaatactcccaaaacatttatttcaaattactcttctttctcatttgttaatcatagtttaagaaatatgattagtagttttaattcaaaataaaaatggtatgttgaataaaatattacataaacataaattagtataaaataatttagtaaattaaatcatttaatataaaaaggaattcaaagacattacagattggcaccacataatttaagtcagtcacttttagacactaaataactttaagagattttttttaatgaaggaacaaatcaaaatggctcagaaaaatcagatggagtggatacacaaataaaatacatgttaatgcttaacacattgaatacaaattttctttatactaaagactttaaaatgtccatgtgttaatttcttttggaggtggaaaaatagtttgtccaaaaagacacttttcacagttgaaggaacttgaaagttctgtcccagtgagtcctaatggttttatttcaggcagcagattcattgtcaaatatcttactttttaaggtctgtaggttatgctgaataaaattctctgcaccatgaacttcagagaatctgaagtcacttctcctgacagaccagtttttcatttttattgaattctgaattgtgtccgatgtaaagtagtaaactatagggtcaaaacaacagttggaaacagcaatacagagagtgattgggtacattgtccttactgctgccactactgagcaattaacaaatgtttgtgttctcacaagagaatataaaataagattgatattgtaaggaacaaaacagaaacagaatatgatcaaatgtacaaaaatcatttttaaaaccttagttttgtttattttgcttctacttaatgtaacaggtttggttaaagtttttagcaccatactagaacaagttacatttaaaattagaggaataaaaaatcccactatttcgatgaaaattacaatccttgagagatatgttttccatgtggcttctggaaaattttcaaagcaggcttctgaggcattgttaccctgagagtgggtagactgaacaaaaacggcgggtgcacttcctccgatcacagttaaccacacgccagtgcaaacaatctttgcatttcttttggttcttagagtctttgacttaaatgggtagacaattgccagaaatcgatctacactaatacaggttaagaacagaatgcttccgtacatgttggtataaaacagcatcacagaaatcttacaaagtaaatctccaaatggccaattccgtgttgtgaagtaaaaaatcctgaagggtaaagtaaaaacaaaaagcaagtctgacattgccaagttaatcatgtaagttgtagtttcatttcggactttgaggacgcagatgaaaatgtatatggcaacacaattggatattaacccaagcacaaacaccatgctgaacatgcacccatacaaagtgtacttaaaggagtcattatagaagcagtgggagctgttaacgcttaccatcgtaaaggcacgtccaattttcagtttggaagcactttcatcagctgcagtctcctttgggattcagattataacctctataacctccaatttatttgcaaattatctggatctttggatggttttataaatatttcctttttctcagaaatacccaaaagaaacatgaaatttgttgctgtaaaatttccgctgggttcttcaacaggaaaatattttcatttgttagtctttagaaaatccatgaattccaaggctcagttaactgacgagcaacctttaaaaaatacagtcaacgagtccaacccataggattataaatttaaagaaaagctgtgatctgtgaccagaatgaaaccacttgtcttctaaacttgtatttcagtagtcaagatgaatactccaaagttaatgtttctttatgcctcagaatgttaagcttaagttatcaatcttattttcttttcagtgcagagtttcagagacttaaacattcccaatttgtcccattttacttcttgcttcttttaaatgaagttttccttttttgttttcctgcagtggatcccagattgtgggtaagcagaagagtcttttaaagattccgaaataaactcccaagcttgttagctcttgttgaattgaggccttttcctcagttgccagttgtatcttgaggtcgctttctctgaagtgaaaaagaaaggcttcctagatttgtaatatgacatcacaggaagaagaggctgggtttggacaaagaaactttcagcccagtttgtttgcacttcctttaatctgataatgtgtctgctgggaatatacctaggaggcttgcaaatggtcactggctgttgaactgcgtggtctgctcattaactctttttatgtggaaatgccttctgcggtgctggcaacctctcagagttgttttgatttgtttcagtagtaataattgaaagaaaaaaatcactattcagcctgttctcttattcgattgttttcgtgtttgggatatgacaatttagaaaagaaaatgtgtatgggtgtgtatttataaattgaaattgttagtgatatcttaacatagcatttcaaagaactgtttaatgactatgaaacaggggcctttaacctttaaggtataacaagcatttgactcttggtttctgaaaaatactcaatatttaattgttatcattatgagtagctcttatcctgggtctcattagtttttgataagcaattttctaacattctttcctctttcctatgcagttgtattaatattttagagctgtttaaatttttaaattactcatttctccaaaagaacaaactcaagaatgtttatctttggtgtggtgttaattttactttctaagcacaaaatgaaattgcatctttttaagcaaaatttttttaaccttaaattgattgaaataaggtttagagaataaaaatcctactacttggcaaaattttaggttcatagtcttatcttccttcttcctcccagctcttcccttaaccccttaatatgacattaactatatattgaaatatatttcagattttgtctccatctaaaagtttctatgaatggtttatatgtttatatttaaagtatactcatattttgggccaggtgcagtggctcacgcctataatcccagcactttggaaggccgaggcaggtggatcacctgagatcaggagtttgagagcagcctggccaaaatggcgaaaccccatctctaccaaaaatacaaaactagcctagggcaatagtgcgtgcctgtagtcccagctacccaggagactgaggcaggagaatcgcttgaacctgggaggcagatgttgcagtgaaccaagatcaagccactgcactccagcctgggcgacagcgagactatctcaaaaaaaaaaaaaaaaagtatacttatattttaaagactccaaaatcagaagaagaaagtgtgtgtaaggtgagggtacttaaatgtaggtgttatttcctcaaagattgaggatatcacaacctctatggcacatgtttttcttgttttaaatatcattttcttcagaaaaggctagatctagttatgccttactgttattatttttttaatttggtctagtttaagctgaaactcttcctcttgggtattaagtaatttaagaacaatttatttttttctcataaattacttagctagcttaaaaataacattacagtaaaatgttttgtgttgttttgcaccattctttcacactcagcaatttttgtcatttgttgatgaactataatctatttctactgtctggactagaaaattcatctattatcaaatgacaaaaaaagatgagtattacttataaccaatacttaaaattttgaagggttgaatatcttttatatcacatttggtatagaaaagatgtatgtgtgtgttcttattagaaggctggtagaagctgagtgagcattaatgaaaaaaggagtggttaataagcttgtattctcattggaaaaaattttctgttagtagttatgtcttactgttatttttttttatttggttcagtatgttttaaaaaaacaaaatcttagtaatcttctttcaaattgatagtctcctctttagtcatctttaattaatgaaatatatgcagttgtatatgctgatctcatcctacttttactttcattttgaatatggcggcattttctcattcaaataattaaaatttattaattctacttggaatatttttctacatattgtcattactcacttgacttgttattcacttaagtcattcatctatagttttttcttttcttttctttttctttttctttctttcttttttttttctcactctgccgcccaggctggagtgcagtggtgcgatcttgtcttactgcaacctctgcctcccaggttccagcaattttcccacctcagcctcccgagtagctgggattatgggcacccgccaccacacccagctaatttttgtatttttagtagagatagggttttaccatgtggccaggctggtcttgaactcctgacctcaagtcatccacccacttcagcctccccaagtgctgggattccatgtgtgagccaccgtgcccggcctgttcatttatagttttttaatgtttgagttactggggcttaaaaatggatagatcactatttgttgaattaggcttttcattattatcagtatcatagtaaatgtttgtataattcttaccacaattcttggttctttgtagatgattctcacatgtttgctgatgaatgaatcataaacttgaattttgttgccagttgtttctactgaggaagagccatagcagagggactgtttgaacaggaagaagataattgaatactgcattttttccagatattaaatttggcctctaattaaggaaccaaaggggaatttagaaactttgaaaaattcttaggttagaattggaaaaatacagagtaactacttgcaaagggaggtaatgaatccatataatcaattatatttaatagatacttttgtatttgataaactcaggcaaactgttattttaatgtgagatctctacacttctggaacttaactctgagaatcaacttatttcttatatggattttttggggggagcgaaaattaaacagagccagatagatgttaaaatggtgaacacaggaacagctggagtctgcagctcccagcgaaatcaacgcagaaggtgggtgatttctctatttccaactgaggtacccagctcatctcattgagactggttagacagggggtgcagcccatggaaggcgagccaaagcagggtggggcatcgccttacacgggaagtgcaaggggccagggaacttcctcccctagctaagggaagccatgagggaatgtgccacgaggaacgatgcattccggcccagactctatgccttttccgtgatcttcacaacccttagaccaggcaattccctcgggtgcctacaccacccaggccctgggtttcaagcacaaaactgggcagccgtttgggcagacaccgagctagctgcaggattttttctttttcgtactccagtggcacctgaaacaccagtgagacagaactgttaactcccctggaacgggggctgaagccagggagccaagtggtctagctcagtggatcccacccccacagagcccagcaagctaagatccactggcttgaaactcttactgccagcacaggagtctgaagtcgacctgggatgctggagcttggtgggaggaggggcttctgccattactgaggcttgagtaggtggttttcacctcacagtgtaagcaaagccaccgggaagtttgaactgggtggagcccactgtagcccaactgcttctctagagtcctcctctctgggcagggcatctctgaaaaaaaggcagcagccccagtcaggggcttatagataaaactgccatctccctgggacagagcacctgggggaagggtgctatgggtggctattggtgcagcttcagcagacttaaacgttcctgcctgctggctctgaagagagcagcagatctcccaggacattgctcgagctctgctaagggacagactgcctcctcaagtgggtctctgacccccatgtctcctgactgggaaacacctcccagcaggaatcgacagacaactcacacaggagagctccagctgccgtctggtgggtgcccctctgggacaaagcttccagaggaaggaacaggcagcaatctttgttgttctgcaacctctgctggtgatatccagacaaacagggtctggagtggacctccagcaaattccagcagacctgcagcagaggggcctgactgttagaaggagaactaacaaacagaaatgaatagcatcaatatcaacaaaaaggacttccacacagaaaccccatttgaaggtcaccaacatcgaagaccaaaggtagataaatccatgaagatgaggaaaaaccagcgcaaaaaggctgacaattccaaaaaccagaatgccttttctcttccaaagaatcacaactcctcgccagcaagggaacaaaactggacagagaataataaactcctccaagccaaaggaccatgttctaacccaatgcaaggaagctaaaaaccttgaaaaaaggttagaggaattgctacctaaaataagcagtttagagaagaacataaatgactgatggagctgaaaaacacagcacaagaacttcgtgaagcatacacaagtatcaacagccaaagcagaagaaaggatatcagagattgaagatcacctttatgaaataaagtgtgaagacaagattagaggaaaaagaatgaaaagaaacgaacaaagcctccaagaaataggggactatgtgaaaagaccaaacctatgtttgattgtccctgtacctgaaagtgacagggagaattgaaccaagttggaaaacactcttcaggatattatccaggagaacttccccaacctagcacgacaggccaacattccaattcaggaaatacagagaacaccacaaagatactcctcaagaagagcaaccccaagacacataatcgtcagattcaccaaggttgaaatgaaggaaaaaatgttaaaagcagccagagagaaaggtcgggttacctacaaagggaagcccatcagactaatagtggatctctctgcagaaaccctacaggccagaaaagagtgggggccaatattcaacattcttaaagaaaggaattttcaacccagaattttgtatccagccaaactaagcttcataagtgaatgagaaataaaatccttcacagataagcaaatgttgagagattttgtcaccaccaggcctgcattacaagagctcctgaaggaagcactaaatatggaaaggaaaaattggtcccagccactgcaaaaacataccaaattgtaaagaccattgacactatgaagaaactaatgggcatcaactaatgggcaaactaactggctagcatcataatgacaggatcagattcacatataacaatattaaccttaaaagtaaacgggctaagtgccacaattaaaagacacagactggcaagttggataaagagtcaagacccatcagtgtgctgtattcaggagactcatctcacatgcaaagacacgtgctctaaataaaggaatggaggaagatttaccaagcaaatggaaagcaaaaaaaaaaaaaagcaggggttgcaatcctagtctctgataaaacagactttaaaccaacgaagatcaaaaaagacaagaagggcattacataatggtaaagggatcaatgcaacaagaagagctaactatcctaagtatgtatgcacccaatacaggagcacccagattcataaagcaagtccttggagacctacaaagagacttagactcccacacaataatagtgggagactttaacaccccactgtcaatatttgacagatcaatgagacagaaaattaacaaggatattcaggacttgaactcagctctggaccaagcagacctaatagacatctacagaactctccaccccaaatcaacagaatagacattcttcttagcaccacatcacacttattctaaaactaaccacatgattgggagtaaaacactcctcaacaaatgcaaaacaatggaaatcataacacagtctctgagacctcagtgcaatcaaattagaactcaggattaagaaactcactcaaacctgcacaactgcatggaaactgaacaacctgttcctgaatgaatactgggaaaataatgaaattaaggcagaaacaaagaagttctttgaaaccaatgagaaccaagacacaacatacccaaatctctgggacacagctaaagcaatgtttagagggaagtttatagcactaaatgcccacaggagaaagcagaaaagatgtaaaattgacaccctaacatcacaattaaaagaactagagaagcaagagcaaactaattcaaaagctagcagaagataagaaataaccaaggtcagagaagaactgaaggagagagaaacacgaaaaacccttcaaaaaatcaatgaatccaggagctggttttttgaaaagattaacaaaatagatagaccactagccaggctaataaagaagaaaagagagaagaatcaaatagacacaataaaaaaatgctaaaggggatatcaccactgatcccacagaaatacaaactaccatcagagaatactgtaaacatctctatgcaaataatctagaaaatctagaagaaatggataaattcctggacacatacaccctcccaagagtaaaccaggaagaagtcgaatccctgaatagaccaataagaagttctgaaattgaggcagtaattaatagcgtaccaaccaaaaaaatcccaggagcagatggattcacagctgaattctgccagaggtacaaggaggagctggtactattccttctgaaactattccaagcaatagaagaaaagagagtcctccttaactcattttataagccaagaatcatcctgataccataacctgccagagacacaacaaaaaaagaaaatttcggccaatatccttgatgaatatcgacgtgaaaaccctcaataaaatactggcaaactgaatccatagcacatcaaaaagcttatccaccacaaacaagtcagcttcatccctgggatgcaaggctggttcaacatatgcaaatcaataaacgtaatccatcacataaacagaaccaaagataaaaaccacatgattatgtcaatagatgcagaaaaggccattgatgaaattcaacactgcttcatgctaaaaactctcaataaacttcatattgatggaatgtatctcaaaataataagagctatttatggcagacccacagccaatatcatactgaatcagcaaaagctggaagcattccctttgaaaactggcacaagacaaggatgccctctctcaccactcctattcaacatagtattggaagttctgttcagggcagttagaaaagaggaagaaataaagcgtattcaagtaggaagagaggaaattaaattgtctctgtttgcagagacaatgattgtctatttagaaaaccccattatctcagcccaaaatctccttaagctgataagcaacttcagcaaagtctcaggatacaaaattaatgtgcagaaatcacaagtattcctatacaacaataatagacaaacagagagccaaatcatgagtgaactcccattcacaaatgctacaaagagaataaaatacctaggcatacaacacacaagggatgtgaaggacatcttcaagaactacaaacttcactgctcaaggaaataaagaggacacaaacaaatggaagaacattccatgttcatggataggaagaatcaatcttgtgaaaatggccataccactcaaagtaatttatagattcaatgctatccctatcgagctaccattgacttcctttataaaattagaaaaaactactttaaatttcatatggaaccaaaaaagcccatatagccaagacaatcctaagcaaaaagaagaaagctggaggcatcatgctacctgacttcaaactatactacaaggctacaataaccaaaacagcatggtattggtaccaaaacagatatattgaccaatggaacagaagagaggcctcagaaataatgccacacatctacaaccatctcatctttgacaaagatgagacaaaggattccgtttaataaatggtgttgggaaaactggctagccatgtgcagaaaactgaaactggacccctttcttacaccttatacaaaaattaactcaagatggattaaagagttaaatgtaagacctaaagccatgaaaaccctagaagaaaacctaggcaataccattcaggacataggcatgggcaaagacttcctgaccaaaacaccaaaagcaatggtaacaaaagccaaaattgacaaatgggatctaattaaactaaagagcttctgcacagcaaaagaaactatcatcagagtgaacaggcaacctacagaatgggagaaaatttttgcgatctatccatctgacaaagggctaaagtccagaatctacaaggaacttaaacaaatttacaggaaaaaagcaaacaactccatcaaaaagtgggtgaaggatatgaactgacacttctcaaaagaagacatttatgtggccaacaagcatatgaacaaaagctcatcatcagcggtcattaatgaaatgcaaatcaaaaccacaatgagataccatctcatggccgttagaatggcgattattaaaacgtcaggaaacaacagatgctggagaggatgtggagaataggaatgcttttacactgttggtgggagtgtaaattagttcaaccattgtggaagacagtgtggcgattcctcaaggatctagaaccagaaataccatttgacccagcaagcccattactgggtatatacccaaaggattataaataattctaatataaagacacatgcacacatatgcttattgcagcagtatttacaatagcaaagacttggaacccacccaaatgcgcatcaatgatagacaggataaagaaaatgtggcacatatataccatcgaatactatgcagccatgaacaaggatgagttcatgtcctttgcagggacatggatgaagctggaaaccatcactttcagcaaactaacacaggaacagaaaaccaaacaccgcatgttctcactcataagtgggaactgaacaatgagaacacatggacacagggaggggaacatcacacatcggggcctgtcggggttgggggttagaggagggatagcattaagagaaatacttaacatagatgatgggttgatgggtgcagcaaaccaccatggcacgtgtatacctatgtaacaaacctgcacgttctgcacatgtatcccaatacttaaagtataatacttttaaaaaatggtgaagacaagcctttttttaggactgttgccataatgaccttgtagactgatttgaaatatagtgtatcagctttggcaacatagggaaaccctgtctccataaaaaatttaaaaattacctgggtgtggtgatgtcaacctgtggtcccagctggttgggaggctgaagtgggaggattgtttgagcctaggaggttgagactgcagtgagctttgattgtaccactgcacttcagcctggtgacagatcaagaccttgtctaaaaaaaaacaaaaaggaaagaatatagcctacatatacaaccaattcaaaatatagtgaatcttggccaggatctgtggttcacacctataatcccaacactttgggaggctgagatgagaggatcacttgagaccaggatttcaagaccagcctaggcaacatagtgacaccctgtttccaaaaattagccaagtgtggtggtgggcacctgtagtcctggttactagggaggctgaggtgggtggatcacttgggcccgggagattgaggctgcattgaggtatgattgtaccattttactccatcctgagtgacagagagaggcctgttctcaaataaataagtaaataaataaaaagaatgaaatatagtgaatttcattatgtaatgcatcggtttttaaaatttaatgacatctgattctgattctttgaatactttcactgcttaagctgctgggttgggtttttgtttttgtttttgtttttgtgtttttgagacggagtcttgctctgtcatccaggctggagtgcagtggcgcgatctcggctcactgcaacctccgcaggttgggttttttcactctcaggtataatagatcaaggagtcaccttacactctttatgtttaaggatttctgatttttgaaacaggttgcacaagaaacatgtataagattaaatattctgtaaaaggcttccctttatgtttcaatagcattcttctttaaaagacctatttttttccacaataagacaccgtgttcttttactataaaattgatcaaagaggaatcgattaaaactttaaagaattctctcattaaaagtttcgaaggccataattgaaattgtacataacattgagaacaggggatatgcaaaaagaaaaaagaaaaaaatcaaatgagagagtatgtgagacttaaaacagaaataaattgatttaagttcaaaagaaagtgtgagccaggcatagtggtacactcctgtagtcgaagctactctagaggctgagacaagaggatcacttaaggccataggagtttggggcttcattgctctttgatgacacctatgaatagccacagcactccagcctgggcaacataacgagacactgtctcttgaagaaagaaagaaaaaagtatgggacattgatattttaaaatttaaaaagaattattctaaacttacttcagtcattttgcatgcagcaaatgtttgccatggtgaaatgtgacttccatctcttaatttacacttatgcaaaaagcagttttctcatttgggattcttttgatgctcattatgataaaattttctatttaggtatagaaacaaataaacctttttcaatttgagaaatgaacatttgtaatttatgttgacagaatatatttattttctataaaaatatcttttagcctaaggagaaaaaatcttaaattctagactagtattaccataagtctatcggtatcatttcgaagtgatttaccttcctttcattattgtaaacacttaatactttatgttactttttaccggaatgtgagtcatctacccaagttcaaagagttgaaccaacttttatagagttggatgggagtagaagaggaaagatttaaagggtgatgaatgatgattagagcaaagtaaaagttgatgggaatgatggttgaagcaggttcaaacaagtagggaaaggaaatcaagaggagtgaaaatgttattgtggtaagatttaaaacttgaataagcatatttatctgtgcatacacttgagttgtcccttcttccttatcttttttttccgaactctcttgttgcttcttcatctccaactcttagaatcatatcacgtcttttctatggagtctccttaatctcatcagttccttttctgtacttccacagtacttagtttgccttttaagacatatacgtgcaattcaattaagaatgaaaaacaaggccatgtgtggtggctcatgcatgtaatcctagcactttgggaggccaaggcgggcagacctcttgaggtcaggagtttgaaaccagcctggccaacatggtgaaactctgtctctactaaaaatacaaaatgttatccaggtgtggtggctcacacctgtaatcccagctactcagaaggctaaggcaggagaatcacttgaacctgggaagcagaggttgcagtgacggagatcatgccactgcactccagcctgggtgacagagcaagactctgtctcaaaaaaaaagaaaaataaaagaatacaaaacaaagaaataattgcaatacaagatataacaacagctattagtaacacatagacatgagaatctacgaatttagtaaagagcttcttgaggagatgatgtgtaatgaaggctagcctttacagttgaatacaaattttaaatttcaggtcttgaaggctagagccattcctggtaataatgtcccattaatatagtcatgctgcctttctcatccaaaaacacagaaaactatttgagtgactattttctccattctctcaaggatgctatgtaacctagtcctactctgaattcctggaagatgttaattcttcacatacaatatatgccttgtggcataaaggctgaatttggtcataaaaccttagttgggtaaggctaggtgggttgtagctttcaaaaatttttcacctagtttagacgctgcaaagtgtaatgaaaggaccaatttcactaggtgttaagtgacttggattctaatccaagttactaaaaattaatgtgcgtctcctgagccccacctactcaggaggcagaggtaggaggatctcttgagcccaggaattccagtttagcctgggcaatatagagagacctcaactcttaaaggaaaaaaaaaatgacatgaccttgagcaaataatttagcttctctattgtatatttgtaaaaggagagtattaaattagacctatagaattcttttcagctcttagctttctatctaattcagtctccccactaattttcaatgacaagaaagaacatatattattgtttcaattttacagaccaagaaactaaaattcagagaagttgtgacttgcttaggattacaaagtgattattggtggagaatgacgaagtcaaaactaaaaactgggtcctcacaagaagtacccaacccagttccttatacatgtttgtataatgaaagaatacaacttagtgagtgcatgcataaaggataatagaaagcactgtgacctagagatccagaatccttgatttctaaattttgaccttaccttgggcaaactctgccctgaactttaagatggatatgacatgcccttttgaccttatgaagagttttcagaataaaatgaaatgaaaacatattctgaatgtaaacctctaaaaagatactattatagatgacatcacctataatatcttaactttatagaaataaaggttatgttgtgggaaatcatggaacaataagatttgttttgttttcttgaccagataggatgcctgtgctctgtcagataaagaagtgatcatgtgatgcatttggtatgccttttttagcactgctaatgtacagccaatttaaatcaaatagacataggctttgcttataaaaaccacatatatttctaagttagtttgcttggtggttaacacattgcatattgcattagtcttaatatcctctaatgttggagctagcactggatcctagaaattcagaataaaagtccaccttacccctgttacaactagccattcatcttctttggtatatagtttagctctccttccagtcactcaagtacaacttaggaaactaaaaccatagctgattattgctggagcaggaactcgaatcctagtttcttgacttctagtcaaatgttctcgtagtaacaggtagctttcaccctttttttcttactgatgttgtgctagttcgttcttgcattgctgtaaagaaatacctgagactgggtaatttgtaaagaaaagagtagggtttagttggctcacggttcttcaggctgtacaggaagcatggcatcagcttctcctcagcttctggtgagtcctgaggaagtttatattaatggcagaagtcggaggggaaacaggcatgtcacgtggtgacaataggagcaagaggaaggaggaggtcccatgccctttttaaacaagcagatctcttgtgaactaactgagcgagagctcggttatcaccaagggggtggtgctaaaccattcatgagggatccacccccctgatgtagtcatcttctaccaaacctcacctccagcattggggagcacacttcaacacgagtcatctaccaaacctcacctccagcattggggagcacacttcaacacgagtcatcttctaccaaacctcacctccagcattggggagcacacttcaacacgagtcatcttctaccaaacctcacctccagcattggggagcacacttcaacacgagtcatcttctaccaaacctcacctccagcattggggagcacacttcaacacgagtcatcttctaccaaacctcacctccagcattggggagcacacttcaacacgagtcatcttctaccaaacctcacctccagcattggggagcacacttcaacacgagtcatcttctaccaaacctcacctccagcattggggagcacacttcaacacgagtcatcttctaccaaacctcacctccagcattggggagcacatttcaacacgagtcatcttctaccaaacctctcctccagcattggggagcacacttcaacacgagtcatcttctaccaaacctcacctccagcattggggagcacacttcaacacgagtcatcttctaccaaacctcacctccagcattggggagcacacttcaacacgagtcatcttctaccaaacctcacctccagcactggggagcacacttcaacacgagtcatcttctaccaaacctcacctccagcactggggagcacacttcaacacgagtcatcttctaccaaacctcacctccagcactggggagcacacttcaacacgagtcatcttctaccaaacctcacctccagcactggggagcacacttcaacacgagtcatcttctaccaaacctcacctccagcactggggagcacatttcaacacgagtcatcttctaccaaacctcacctccagcattggggagcacatttcaacacgagtcatcttctaccaaacctcacctccagcattggggagcacatttcaacacgagtcatcttctaccaaacctcacctccagcattggggagcacatttcaacacgagtcatcttctaccaaacctcacctccagcattggggagcacatttcaacacgagtcatcttctaccaaacctcacctccagcattggggagcacatttcaacacgagtcatcttctaccaaacctcacctccagcattggggagcacatttcaacacgagtcatcttctaccaaacctcacctccagcattggggagcacatttcaacacgagtcatcttctaccaaacctcacctccagcattggggatcacatttcaacacgagtcatcttctaccaaacctcacctccagcattggggatcacatttcaacacgagatttggaagggacaaacattgaaaccatatcagacataaaataggaaacttggtccatagcttaggtaaatattaagcaaagaactttgtctttaaatgagtaagctctgcagactttttaaaacactaaattctaacattatgatagaaatttaagattaagagattttagacattttcatccttctgtagattaaaatcgtatgatgaccatccttcatttttagcttcatctttatttatttaaaaagtttgcatttgtacatagtaatgtgccaagttttatacaaaagcaggaaatatctctgctgctttcaaataattagaacaagggttttctgtgaatagtaaatttaacaccttccagcatagattattatcagaaatccaagtactcttcagttaaagtaaacacttattgacttgtatcttttacctattactgaggggtagaagttaaaaaggattggtctctcaggatgctcctggaagctgcatgcttgtggctataaagctattctctgatatacctgaattcttttgctcccagtagtgaaattgtgtgtgtattaaaagtttaagcattgtttactccctgatttatatttgctgatttttcatattattgtaatgttataaaatggaagtgcaaaaaagggttgttttagtcaaaccaagttcggtgctttgaaatgactcagaggcaagttgcagaaaatattgtagacttagatgtagaaaagatatgagggggcaacgtaagaaactagaaaggattgctaggtgcagtgacacatgcctgtagtcccagctactctgtaggctgaggtgggaagatcactggagcccaggagttctgggctgtgcgctatgctgattaggtgtccacactaagttctgcatcaatatggtgacctcctgggagcaggggactaccaggttgcccaaggaggggcgaacccacccaggtcggaaagtagaaggattgtgtctctaggcctcagactcctttgcatttttctgtcctcaccctgcacatagtgaaaatcataaacccacattattggtgtggtttatagaagaaaaacaacttagaactaaaaaaaaaacaaaaaaccttgaccttacgtaaagagattttcaaatgaatacactttttgtgtttttaaaattaaaatgttatatggaattatatatattattttaaaatgatttcctgcttagctttttaaattaactggtgccaatctctcaaataagacaatttatgtaccagcagtaatcaactggaaaatgtaatgaaaaatattcaatttacagcaataacaaatagtacaaaataccttaggaataagcttaataggcaaagtgcaggatgtagatgaaaacaaagcaaaagactacaaaactttaataaaggccataagagaatacttgaacatgtgccaggcagtttttctgggacaaatctatacatttaatgccaatccagtaaaaatctcagtatgttttcagtgcatgtttttacaagtttgttcacctgtagatactgtgggttatatcacctagcagtttcatttctaagaaaaaaatcccctcctaatttgcattctccacaccttcacccaaaccagattattattagacttttaacaggtcaaagtagtatcttgtttagtttgcatttctttagttataaggagtccagaaataatcccatacccaggggaatttaatgtatgataatttatccacttcaaatcagtggagaaaattcaggataattcagtaaatgctcatgagttatcaggatagcaatttgaaaaaaagaggtagactttgatttattctttataccaaaataaattctagctagatcaataatctcaataaaaaatgactccatttaaaaaatgactccatataagttctggaaaaaaatgagcacgttagaaaaataacagtagaggccaggcactgtggctcatgcctataatcccagcactttgggaggcgagacaggtgggtcatctgaggtcaggagtttgacaccagcctagctaacgtggtgaaaccccgtctctactaaaaatacaaaaattagctgggcatggtggcacgtgcctgtagtcccagatactcggaaggctgaggcaggagaatggcttgaacccagggggcggaggttgcagtgagccgagattgtgccactgcactctagcctgggtgacagagtgagtctccatctcaaaaacaaacaaacaaacaaacaaacaaacaaaaaaacagtagaggcctgctgtggctcacacctgtaatcccagcaaagaggctgaagcagaaggattgatttctggagcccaggagtttggggctgcagtaggccatgccactgtacttcagcctgggtgacagcccaactctaacaattaaaataaaataatatatttaaaaatagcagtagaggctttctaagtattatataaaatctagtgtttaaaaaaagataggtttgactaaataattttgttgcaagaacaacataaagtggaatgaaaacatcagtccatcatatgaatcatatgagttataacatttacagaatagttaaatgacaaattatggaaacaagtctgttagaacaaactaacaaaaataacaacccattcaaaaaggtgggagatgcatctaaacaagcatatcattttgtccttaacttaaaagtggttctcagttttaggtacccaaatttaatatttgtattttttttaagttttggccttcaaaataaaaatgactatacatttgattagacttctttcttttctttttattatagatgattgatttttaaggactagtgctatgaacattaaagcaagtatgcttaaaaccaaaaacatattttgactttaggcatttatgcagataaatgtttcgctcttaacccacttggaattcaaagagactagctctttaacagatactgatactcaaaggtaaggaagaattattggtatgattctaagccactagtcatctattcccagagcaaaatttctgtggttacttttttttattggttttctagtgtgcttgctttaatcaactgttttcacatgtttggaaaatttgagggtttcctgtctatactagaagatacgagcactactccagaaaggttagaaacaaaagaccaaaggacggcttctacaaaaggccccctgttaaagcccagccgtttgttgttgttttagttaaacagaagtggactatttcaacctaaccgaaaaagattgctggatttttgccctggccatataaataggaaattaagacaggcatattaaaattttttcctgcttatgttgtcttcatctctgggtcaactgatacttatttttttttccagtagcaaaatatttattgagtgtaactgtgtaccaggtgcttttctaggtgctgggaatatagcagtgaataaaacaaaatccctgagcttatattttatttggagaagacaatcaataaataaacaattatacaactggtcatatggtgataagttctctgaagaaaaataatttaggaggaaaaagggggtgggcttttactgttctacatagggaggtcaaataaggccttgctaataaggggacatttgaacagagacttgaaagaagtgaaggaatgaatcatgtggttgtctcagggaattaacctttaactgatcaacatctttaaaaggccttctccaatctgtatttccagctcacctcccagaaattcactcaccatgttcatgtccccaagatctttggggcaaatagaaatttctaaacagtatttcaacttggtaagattctacatttctgcttctgattcttatttttcatggcacctcataaaataggaatgcatgttttgtttttttgtttttttttttgggctacttgccagtgttctgaaactaaatacttctcggagagtagctgtctctcattaaagagccccagatcaacagttccatttcagtcacattccaccctgacttgtctcttctcaccattcggtgattaggttcatgtcttttactctttaatgctttggttagcatcctgtttacctcaagagactgaactttcttctcctgaatttaatttccctgatagcagggacatctgacagcctatgtcaactgtcttccttgacttctgtcaattatttgtcctaactatgcttgagtaagcgtacaggaatataaaattttatttccttggaataaaattttaatttataatataggagagatattactattaaggctcttaaaaagcaattataagagacagaataaaattaaaaggaaaaaagatagcataaccctacaactctaataaatctgctgtttatgattttccagatttaatttcagtctttgctattatgcttatatagttgaaatcagagaataatatctttaagatttggaatgggatactgctctttctttttatgtgctcttagataagaactctttctactgtgtcttataaactctgtcataccataagtttctcaaagtgattttaaccactgtacattttaaacaatatgagaaataaattaatttctgatatgaacatacatgtaagctactaaacctcagtattatgaaatatctaaaacgtgacttattagaaatagattcttttagacgttaatttttttttcaaaaagatacatatgtacttttctatttatgagtatacctgggtaaatatagaacataggaaaatgtactttgatgttttaaaacatttaaaattatttaaatataccactaactctaaattttaaaattatctttgattagaagcattaaaattcttatttaagatgtatactatttgaagaagagaattgggattctgttgccttgctttgtaacttaaaagagctttttcagggactccctcagagtacctgctggagatgaatctgtaaaaaatttttgttcagagaatttctgccactaaataagtcttaaataagtatgccacataggatagactgtatttaaatgaaaccattttttataacttacaccaaatattatgacaaaagcataattgtttcttgataaaactgttccactgttttatttgttttactgttaacaaaaatgcatttttttttttttttacctttagtaggtatgcattgtattacaaaacaatgatatcttttggaaaactttcagttaaactagacaaataaggactttggcttattcagatttattccattcatcatctttgaattagtttcttcttgagaagaagcatatcttacaacttttgtctttattacctcaatatgttttatttatatgtatatacatatatactttttttcagatagggtcttgctatgttgcccaggctggtcttgaactcctggactcaagttattctcctgccttagcctcccaaagtgctgggattataggcatgagccactgtgcctggcctcaatatttatttaaaggttacaagaatatatgttcttaaaatgttgagaattaaaataaataatttctccaatcataatagctttgtattttattatattataaattgaaacattgaagttttaaaattcttcttcaatgagccaggcctggtggctcatgcctgtaatccttacactttgggaggctgaggcaggaggatcagttgaggccagtagtttgagaacggcctggacaacatagtgagaatctctctccatttaataaataaataaataaaattattcttcagtgaatctgtttttggattcagtcttgataataaaaacggagaaaaaaaattttaacagatagattatttcaatattgctctgtcagcaatatctggaaatagcattagtcatttttcttcaggtgcttttatccaacaagcctaagactcctaagattcccttccccattaggaagctccaggcaagcaagtgaaaccagcagaaggcacccagccacaaaaaacaccctggcccaggaagtctctttaaccctacagccgagactctttctcagcccaggaacaccaggcctgtagagagacactattcaggggtttccactatacaccattccaccaggcagcttgacctggtgaaaatgtgtaggtccatgtatccaccaccacaagcaattgcacccatatccctccagcctctctacccctgtccctaacacctggccactgctaatctgcccttcaattctcaaattttgtcatttcaaaaatgttatgtaagtggaatcaaacaggattagttttttttctcattcagtataattttctggagatccattcacgatattgcatgtatcaatagttcatacctttttattgctgactagtattttgtagcatgaatgtactacagtttctttggccagacacatgttgaagaatatcaggacaggttctagtttttggctatcacaaataaagctgctatgaacatttatgtttagtatcagtatgggttttcttttctctgggataaatgcctaatgagtaaaattgaagagttgtatggttattttgcattttctttgataaaagactgcaaaagtattttccagagtggttgaatcattttaaatttccgccagcaatatacgagtgagtgatccagtttctctgcattctttccatcatttggtgatgtctttattttttattttagtcattctgatagtgtaaggatatctcagtgaggttataatttgcatttcccatcaggatgatagctaatgatattgattaacctttccctgtttatttgtgacctgtatttcctctctggtgaaatttctcttcatgtctttgctcattttctgattggattgtttgttttttaccattgagttttgagggttctttatatgttctcaatactagtcttttttgttagatatgtggttagcaaatattttctcttggcctgtagcttctttcttcatcttcttcacatcatgtttctcatccaaaagtttttaattttcataaagtccagtttatcactttttccttttatggattatgcttttggtgtcaaatctaagaactccagatcctgaagattttcccttatacttaaaaaattatagtttcacattttaagtccatgatccattttaagtttatttttgtacaaagtttgagatttgggttgaggtttttttagggggtgctgagttgggcaccatggatgttcagttgtttcagcaccatttattttaaaggctatcctttttctattgatttgcttttgtatctttgtcaaaaagggaacaaagaaaagatgagacaaatagatgtagaatttaaactaattatattaataattgcattaaatgtcagtgctctaagcagcccaattaaaaggcagagattatcagagtggatgaaaaacaaaacccaactctatgctatctaaaagaaatctattgtaaatataaagacacgaatatgttaaaaggatgaatgaaaagattaggtcctggatggaactgaggttaactgaggataattttaagatttgtactatgggtgattaggtggttgataacacaattaaccaaagtaggtattgaaagaccatctcatagctggttggtgatgaaggaaatgagttcatgttaatgtttgaacctattatatttgagatgtttgccacatattcatgtggatatctttggtgtccagttggaaatatggatctagaacttgaaagcatagttttagtcagaaatgtagacttaggaataatatagatatagataaaatcatgaggccagttgctgtggctcatgcttgtaatctcagcactttgagaggccaaggcaggcggatcacctgcggtcagaagttcgagaccagcctggccaacatggtgaaacctcatctctactaaaaatacaaaaattagctgagtatggtggcacatgcctgtaatcccagctactcgggaggctgaggcaggagaatcgcttgaacccgggagacggaggttgcagtgagccaagattgcaccactgcactccagcctgggtgacaagagcaagactctctcttaaaaaaaaaaatcatgatagtggctcagccagcatatgtattggcaagcagatctgcagaaatattagtattaaaggaccagcaaggtaaaatggaaaagatcttcagaaaggccaaggtctgccaaaattcttctattttctattctagtttcctcttgcgaggcaaaacagtcttagaatttagcttagggtggcacaaaaacatttcctgtaatgtagttctaataatattccttaaaatacccagaaaacaatagcaatttctgccttccacttcctctattgttaatttttctactagcactactgacttgtacttactttgataatcagaatctcttttaggagcaccttgacttaatagccttggagtcctttactttctagacaagttcatgcttgccttagaaatgtatgttagttatgaaaagtcatgtagaacagacttatagcttctactttttctatcaatattatttacccagtgaaatttatactaatcttgctgacagtgagagcctggtttccttcacaagactaagtagcaaaacagagtgaagcgttgttcagagagcaattaggctgacagttaatttgagtagataagtaataacatgagttgagtacaagagaaaactactgcccaagtcctggatagaaacaatgctttagaaagaaatatacatattttactttcaaaagttaagtattccatgaaatattttctttatagttaaaaaagatcaattgctatattaattatctgttagaacaactaacatttattatctcacacaatttctgaaagtcgggaaactgggagtggctttactgtgtgattttgactcatgtttcctcatgagagattcttaaattgtcaaccaaggctgcagctagtttaaggcttcactgggattggagagtctacttccaagttcactcgtgtggttgttggcaggcctcagttctttgctggctgatggccaggggcttcattttttttgccatgtgagcctctccgtagggctactccatagcagctccctgcctcaaccccagtggaagagatcctagagagggagagaacctaagatggaaactgcagatttttataaattcatctcagaagtgacatgccatcacttctgccctatgtcattggcccacagactaaccctggtacagtttaggaactgtctgcacaaggatataaatacccagtgtcagagattattggggtgatcttggaggctggctgccatagttatgacttagtgtcaattagaaaacaaatcctattatcagttttcttgtttgtgctttgctgtagttaatttgactcatgatatggctgcatcatatgtcaatattctagaaatatttaccaagtgtccattatatgcttggcactggaattttattttaagaactccctgaaagtcccatctgaaccctggtagtcacctgtctaaaatccttcagcgagtttatattttgctatttccttgctatgaaatctgtattttagcattatggaaagaaaaatttctgtctcaaaggcttgtgtgccaggtgcccttctaagcactttacatttattatctaacttagttgtcaaaacagccctatagtaagcattatttttcttatcttatagattagctgcatgaagtttccccagggccatattattttttcttctcttgcttctaagcacactattcttctgctttttacttaaaataatttgttctttctttaggattcaactcaagcataatctcttccaagaagttttctctaatgctcctaatctgagttagttgtctcttctgattttcatggcaccctgtgtattcttttattctggtacttagcactttgtattgctattttttatttacttatctgttttttttttcattagactgtaaactatagcataaaagttcaaaacaaaggctctgaaatcaaacagtttggaactgtgtcctggatccaccacttattcatgtgactggacaatttactccttgtctacctttcttcacttataaaatggcatttaaaaaataattaccttctttctagagtttgttgtgagaattaaataatataagtaatgtggttggtgctatgtctggcattcaataaatgttatctgttaagctctttgagggtagaattattgattgcttatcatgtgccatgtatcataccaaactttttatataggttattttattttcacaacaactctatgtagtgggtactactatgaatgtgctatttctcttagcatctctagatgaatggatcagtgaatgaatgatagatggaattgtggccagtggaactaattgtaggggtaaacagcaacctagaaacatggttaaaagcatgacaatgggcaaagaaagagtgaaagaggcagtaagcaaaggaacgtgactcccatactagtatagcagctaacggcacaagttttagaaacaggtagacttgggtttgaatcactgctccatcacttatcagccatataatatggggcaaaatttataatttctataaaatacacatatctactttatggacgtattttgaagattaaatgagataatatatgtaaaatatttagcatagaacctagcatatagtagatattcaataaatattaactagtactattattaaattaagataatcatgaagacagaattttggtagtgaggtagtgagagaaataaaatagaatcatgaagtataaggtaatgactttgaatcattaatcatagttatcgaaatcaggcatgatagaaagattacggttgttaatcttccttatagtgcaatatcctcaccagtccacacaacatttttgcccactgagtctgggataaagttaaaaattaatcctcataaactaaagttaatgaaatgtttagaatattctgccttcttaccgtatcatcactttagcccaaatgctgggaaaaagagaaacaaaagtcttctgtcagctattgaatgtgttatgatttagagaatttctgagattcacagtagagtctgtactttttacatttgatagacctcaaatttgcctgagtttttagtgttccagaaaataggctttggggaaggtttgaaagaaggcctttttgaacctaagaagacaagaaattgaactgttatcacaatattgctatttaagaaagaatattaagtcacttttcagaaatttatatcagaattagaaaaatgcagaaatatagtttatacttcttaaggaggtggtggaggagattagatagatacatgcatacatatatacataagtctaaatatttttatatgtatatgagagaagtatcaggaatagggtaggaaggagatagaatagtaggattacattagaatctgcttaggagcttttcttacatgtagatattctctctttttgggtatatcaaaatcttgggagtaaaagggaaacctggcatgcatgtttaataaagcttccttggggactctgatatatgctgcctcccaaataaattacaagccatatcaggaaataggagtttacagtataaaatataaccgaaaactaaagtcagatgttctacaaaatattaactatttttcctgagatagaagtggttgaaatttgggagataacttttgctatgttctgtgaggcaaagaggagggaggctagagttgatgaagacatctttcttttatgtatgatattgtctatgttgggccctgttaattttcatttacttatgtacaaatagctaatgcatattttttaactttaatgtttgttatttacatgcatagcctgatgggcacatgatccaaagtttaattttttggttgaaatttagtatttggcttcatatatataaagattggggtaaggcgatctgccttgcctttcttctactgtgtcaaagaatttatgatcaagggctagagtcagtattaattatatgattttgttttaaccaagaagaacttagttaaatttaaaattgtagttgcactcatagataaagggttttctttgttaaaaggtaaaaaagagacatctcttatacttgcttaacttttcatttaaaaaattaatgtattcataataaatagaaaatgaaaggagcttaaaaagcaaattgaacacatagttatcagagaaaacaattttaaaattatgattttaaactctcatctgtattgctaagaatgccctatattgtaatattcaaggtttgcttataattaaaatgtagggaagaaaaaaagaatcctgcagacattctaaggatgacctaggccattgatagtctaagcttgaaattaatcattagattttctgaactcttattacactggatctgttcagtctgctttaacaaaataccatagatttggtggcttataaacaacagaaatgtatttctcacagttctgaaagctgggaagtccaagatcaagtttccagcagatctgatatctggcggaggcctgtttcctggttcatagatggcaccttcttaccatgtcctcagatggtggaagggacaaggcagctctctggggtcccttttataagggtactaatcatccttttcatgagggatgtgttgaaactaaattgtgcctgaagacccttatgttacctttacatatcaaatttctattgtatctggccaacctttgattttaaggcactagggcaagaatgaccaacgggtttccaaacatatagaagtagtaacatgtgcatatcaacaaaaatcacttggtaggaacccaatactagctaataagcctactcctactgtcttagatctagttctgtttcagaattggaagctttaaggattatgaaattctgggaacttggagtaggtccacctagaagtagaagcagcaaaacccaaaaaaccaatacaatttttaatagtgttgtttaatttttaagtgttatttactagaaaataaaactatactgtgtttaatcatcaagcaatttttaacaaaaaactttagcactaggaataggttaaacttgacacaatttgctatcatagaattatatatatgggtaaagggtaccagttagattcccattggcaaaaacctggtgattttcattctgtggtgtagagatcctagttaagaggcaggaattatttaaaaatgactttaattttgatcatttaattataggacctatttattcacttgtttttaacttattcacaaatcttagtcatgagcattattaatagataatttgatgccttgtcacttagcagtacaagcatgtttatttctgacttttaaactcgaattcacccttcttgtgtttttctattcagtcgtaacccactccttctacatctacaaaatttggtgaggcatctttgactttcatcatattcagacatgctagcttcaagaactttcctattcctcttttaatgtctgtttctcacattgtattagttccttttatagtattaattcttcctacagtatgaattttattttttttttttgaaatggagtcttgctctgttgcccaggctggagtgcagtggcaccatctccactcactgcaagctctgcctcctgggttcacgccattctccttcctcagcctcccgagtagctgggactacaggcgcatgcaaccatgcccagctaattttttttattttttgtagagatggggtttcaccgtgttagccaggatggatatagtatgagtttttattcattttgcaaatattcatcatagatatttttgtcttatttcagttagaacaggatttttttctttggattgagaaggtaactttcctactgtacttaggataaattccacaaaaactctttaacaaggtttttttcctggctattagaaaggaggaagaccctcactgaattgaagatagtaatgatgggtgaggactttgacttctgttaacacctcattcagataagtgactattttagtttaattacatgaattttgtcatctcccttggagctgcctcccagagctggtatatcagacatcctcaagtaaacctggacccaattttagaaatcttggctaattttgagttaggaagtcctttctttaaacaatattttaaaattaacagaacaatcacaaaatatattttacatattgcacttttcaaaatactttaaatatttaaaaaaatacccaacaccacaaagtaacttagtttaaaataaaataaaaatttttgaaatcagacctaatcaaattgatatatctctcattttctttgaaaattttgaccaagatatcaattaataaatccactttgaaagacattttaagacatttaattaataaatccatttgaaacacattttaaaatgtgtttgttcatgtgtataaaattatgtcattgatataacattactattcctttaaacattgttatgttcttaaaaatatctcctcttagtctataatttagcgaaaggattactgttttgaaagacttaaaaaaaatgcttagctattttttagctaagaaaaaagattcctttttcagtaaatggataaagctgaaaaataagaaattaataaaatgttttaaagaaagagtcataaatatcttaatatttaattctaggaagcttctctattcatttgcttttttatttttaaaaagaagtttaaaagagttttagttttaatatctataaacttcaaatgttattccacactcaaaaaatatttctaatgtattaagtcacagtttactaaaatagctaagttttctgattcataaaatgaataataacacttaattttaagacttattttgaagattaaatgaggtaatacattcaaataaaaccttttaaactgaaagtactttcattcttgtgtaaggaaaccatgaaagtaaaagacacatcattctattttgccagtgtatcttaaattaactagcttttattgtcagtttagtgttcagggcaccaagggtacatttcatactaagattgtgcaagtgagagtaaatgcctccttaaattttccatcttaggcacctccgttgcttttagacctggctatgttttatattgcttatatacatttttttttcttttggaaaaaagataagctgaaaaacatttttgttgatgacatgctattgctgaaataaaaacccagaacatagtgatgtgtaggaaaaaactctctcaaaccatgtttttcttctgctctcataccaccacaacagttgtcaacacaaaagacttctgtgacaaaatgtgtgggtttttttccccacacactaagcagcagataccagctgggcatcctccaactcagttctgatactgtctacttggagatagtgtcagatcccactggttggggtctcagtgcccatacctcatacccccagacaccatcctaggcctccagaacttctgacctactggcttcaaattggggttctcacaccacactcttcaggttcaattaatttgctggagctgctcacaaaactcaaggatactgggcacggtggctcaagcctgtaatcccagcactttgggaggtcgaggtgggcagatcacttgaggccaggagttcaagaacagcctggccaacatggcaaaaccccgtctctactaaaaatacaaaaattatctgggtgtggtggcatgcccctgtagtcccagctactccagaggctgaggcacgagaatcacctaaacccaggaggcagaggttgcagtgaactgagattgtgccactgcactcctgcctgggccgcagagcaagactgtctgaaaaaacaaaaagaaaaaatcaaaggaaacacacttaccggtttattacaaaggatattgcaaaggatacagatgaggagatgcgtagggtgaggtatgggagcaggggtgcagagcttccatgccctctgggggccacaccctccagaaacctccatgtgttcagctatccagaagctctcctaatccagtttttatgatgtcagcattgggatttttatgatgtcagcattcctcccctacactatagggcaaaaaccatctctggggagggtcttaaagacacacaatttacaatgatgggggaaaaattagagtcctgccttggaacaggttaaaggagggcaagagaaggtccgaggcctgcccctgaggcctaccacaccaaacgttataacaacacaacagtttttatatattttcagttttgcataatatgaagttaaagacttaagtaaattgagtaaatagtagttttttttttttaatttcacagatcaatagagttaactcctgagttatatgcatacaaccccaaagttgtttgctgtctggagctgtgcctacacccgcctggcatattcttgagacattggagctaggaagttggaaattgatagaaaattttgtcacttgtaacagagctaaagcaatatggattatggtggaccctatcacttggaatactttcctgaaagcaacacaggtcatcattgccaaatatttttaggaccccaattctgtactaagtgctagtgatgtgataggaagccagacacaattgaactagctatctctatattagtgacttatcctaaaacagagtttctgttgtaattggtttactgtttctcttagaatatttaaacgttttaccatggtctttcagattctgcgtgatcatacagcaacctcttctttagcaacctctccactatcccacccgggtactttagttctggtggcctctttcattttctgaaagaacatcagtttcttagcatatgatctttcatcttttggaagatctctgccccttctcctttcaaagcacagcctccttctcacatttcaagactcagcatccatgttaccttcccagatcagccttccttgaacccaccccatccacctggatctccctgtttattcttcatgagagaaccctgttctttcataggatttttctgaatttgtcatcacatacttatttccttgtttgtgtgcctcttctcaccagaccctgagcaccgtgtaagtaggaacaaagtattatttcaaagacccaagtctgaaacggtttatctgtttatacttaatggctaaggtatacatgtacacgtattctatttgactaacatttgaggtaaaaaacatgggggaaaggagcagataacacatatttttagaggatttagagtatatataactaagaaggttccctttatttgttattttttgggagggaatcctgctctgtcacccagactagagtacagtggcacgatctcagctcactgcaacctctgccctctgggttcaagcgattctcctgcctcagcctcctgagtagctgggattataggtgcgtgccaccatgcccggctaatttttatatttttagtggagatggggtttcaccatgttggccaggctggtcttgaactcctgatctcaggtgatccacctgcctcagccttccaaggtgctgggattacaggcctgagccaccatgcctggccccattttaaatcttattctcactttgaggtggagttaatctcagaaaactttgagattaagttatcttaatatcaaccttctcactttattcatttattcaacaaatgtttattgagcccttactgtgtgccaggtagttttaaacattggggatactattgaataagatagacaaagcccaagccttcctgcatcttgcttgctagtagcgagataataaataagaaaataaatgaatttataacataacctcaagtggtgatcaatactatgaaggaaatagagcagaggtaggagtagcaaataaatgggaattatggctgtcttaggcaagatgtttagacaaggctttgcttaggaggtgctatttgaggagatatgtgaataatggagtggggtgagtcataggaagcatggtcaaagagtattttgggcagaggaaacagcaagtacaaaaacccagagaaaggaagaattatgccacagtcatggaatagaaagatgaccaggatggctggagtaagaagagtgttagagcatgaggtctgagaggtatcaaggggccagaactcatgtagtgttttgtaaaccaagataaggcatttgaatttattctacgtgtgacaggaagctcttgcagggttttgagtatggaggtgggttagggagtaacatattagctctatgaggacatctaggaggcagcaagagtagaagtatggaaaccagtttgtaggatgcttttgcagtgggacagaaaagagataagaattgctttgactctagcaatggtacaggtaatgaaaagaagtcaaacttggaatatattttgaatttagagccaatatgacttgcctggtgtcttggataagtatgagagaaagaataataatgatgactccttgtcttttttgctttgggcaactggatacaaggagtgatttaatgatatggtaaagactagggagaagcagtcgtttttggggggtggtagaggatgattaaagtttattttatacatagacatcaagtgaagatgttgagtaaggtcaaatagggcagatgcttctgaaatactccttcaaggctatttagtatctgacaaatggagcattgttacatttatggctctacttcctagcatagacatacaacatatactgggtggatggatggataactaggcatacagtcatacgtttgaggaaatagagtgttctttgtataatggcactcatagatgtaaataatcacaaccataataatatcaaatattatatattactctgtgtcaagcactgttcccaattcttaacattattaattcacttctcatatactatgatttaagttactactattatcattagtatctctgctctacagttgagaagcttattgagggtcatgtagctacaggtggccaggatttgaacccatgtactgtggctccagagtttgtgctcctacctactgcactatagttttcccatgatcatgacatactcatcatcataaaccaatatctatatatctgtgtgaccatttggtttggggtgatggagtgataaaagtgatatttgaatgaaatatgaagactattggtgaaaaatgccaccttaatccttggaagagaaatttacttttagtataatcctattgggtgaatctgaagcacaactagattttatctcatatctgaaaggtatctaaaatatctaattagtgtacttaagtcctattaatcacacatctttgcaaggtctcaagagtctcctaaaatttcattgtttgaaagaaaaattggtagtaggccactcttgaatatatgtgggtttatactcataccattttagttaaagattttcaattcatccatggctaggaagtataaaatatttagtataacagtatgtgtattagctggaatgaatttcctaagtgttaattgttagcattactttgctcagatgaaagccattatttacactgcagtgcccctaatgaatataggaaaagatgacttgtcaacaaaaattatatgattggagttgtagagtctgcttctttttccaaagcatacatgccaccttctcttttttctccccgccataaaatccagctcctgtaggacaccttttcttctgatgcctccataggagacaactcatgctcaccatctccacctttaagaattatttctgtagtgagtcactattacagataataacccatctcctgttggtctgctgaaactgaaaaagggctgaaaattgttaaacttttgcagtgatatgtgtaatgactatatgattatcatgcctctttttattcacagcttatcaagtacctacttgacatgtagaaaggaaaagagtaaagttaagaaaagacagtttgtttctcctgaaagtttagagttgaaagcgcatctttaacacattcatacatacatccaagaaattcaaataaaataatcaagccaaatcactgaaagctgagaaaagagttgaatgttcaagtggctacttgaagtcacttcatgtgatgtatcatgtaatcctgcaaaatgagtgctgtattcctgtttttcaagtaatgaaactgaggttcagagagcaaaacgtttcattgctagtaaacttcaaactagtaaacaagaatttgagcttatatatctctaattccaggacctgtgcttttattgctaatggcttttttaaaacttgttcttcatgcttttttttattgagtgaattaagagcaggataaataagaaaaatagtatttagtaatgtattgcttaggcatgagtaacttcctatttgaaagaactgttgcgtaatcgccgtttttttttctttctttttaaatttcttctccctgcatagtttctgcatctcccagatcgcctttttgttattttgttttggcatatttatattagggactttctggaaatatttgattgccactcatataaaagagtaaatcactaaaaattagttagaaactctgagcacctggatgaggtttgggaacttcattgtatagttatttggtagagcaatttcttaagaaacccccattgcatatctttaggttttttatcctgttactcagtacctcactgcccaaagtacctggtatcgccactgccacatccttttggtgggttaaaagtttatctggtttgcctgttggctttccttaatgctgagttccaattcagttttttctcacctactgagtaggttaccatttgtgtatctgccttccaagctttcaaaattttgtatctccagcctggacaacatagggagaccctgtctctacaaaaaaaatttcagaaaattagctgggcaccatggcgcattcctatagtcccagctactcaggaggctgcagtgagccatgattgtgccactgtgctccagcacgggtgacagagcaagaccctgtctcttaaaaaaaaagtgttgtatctgaaaggtttatgtcttttaaaataagtcagtttattgccgttttagtggggttttatgagagagagttaatgtctgcattcatttggcatctttaaccaatgttgtttatcttctgcagattccatttaatttagtttgttgtagttttagtcatccagaagtttccaatttatatgaattcagatctgttcatatcctttgcccacttttgaatggagttgtttgtttttttcttgtaaatttaagttccttgtagactctggatgttagaactttgtcagatggatagattgcaaaaattttctcccattctgtaggttgtctgtgcactctgatgatatatatatattttttttttttttgctgtgcagaagctgttgaatttaattagatcccactgtcaatttctgcttttgttgtgattgcttttggtgttttcatcatgaaatctttccccatgcctatgtcccgaatggtattgcctagattttcttctaggatttttagagttttcggttttacatttaagtctttaattcatcttgagttaatttttgtataaggtttacagaaggggtctagtttcaattttctgcatatgactagccaattctccgaggaccatttatttatttaatagggaatttatttaggaccatttatttaatagggaatgctttctccattgcttgtttttgtcaggtttgtcaaagatcagatggttgtaggtgtgtggtcttatttctgagtcctctactctgttccattcgtctgtgtgtctgcttttgtactaataccatgctgttttggttactgtagccttgtagtatagtttgaagtcaggtagtgtgatgtctccagctttgttctttttgcttaggattgtcttggatatttgcgctcttttttgattccatatgaattttatgaattttggttccatgtgaattagttttttctaattctgtgaagaaagtcaatggtagtttaatgggaatagcattgaatctataaataactttgggctgtatggtcagtcttacaatattgattctttctatccataagcatggaatgtttttccatttgtttgtgtcctctttgatttctttgagcagtggtttgtggttgttgaagaggcccgtcacttcccttgttagctgtattcctaggtattttattcattttgtagcaattgtgaattggagttcattcatgatttggctctttgcttgcttattgttggtgtataggaatgctagcgattattgcacattgattttgtatctgagagtttgctgaagttgcttatcagcttaagaatgttttgggttaagatgataatttgacctcctctcttcctatatgaatatctttgtttctttctcttgcctgattgccctggccagatcttccaatactatgttgaataggattggtgagagagagtatccttgtcttgtgctggttttcaaggggaatgcttccagcttttccccattcagtattatgttggctgtggatttgtcatagatggctctttgagatacattccttgaatacctagtttgttcagagtttttaacattatgttgaattttatcaaaggcctcttctgcaaccacagataatcatgtggtttttgtctttaattctgtttatgtgatgaatcacatttattggtttgcatatgttgaaccagccttgcattctggggatgaagccagcttgatcatggtagataagctttttggtgtgtgctggatttggtttgccagtattttattgtggatttttgcattgctgttcatcagagatattggcctgaagttttctttttttgttgtatctctgttaggttttgctatcaggatgatgctggcctcataaaataagttagggaggagtcccttcctttcaattttttagaatagtttcagtagaaatttgtacctctggtagaattcagttgtgaatgcatctgatcctgggatttttttttttttttggttggtaggctatttattactgcctcaatttcagaacatgttattggtctacttagggatttgatttcttcctagttcagtcttgggagggtgtatgtgttcaggaatgtattcatttcttctagattttttagtttatgtgcatagaggtgtttatagtattttctgatggttgtttgtatttctttggggtaagggtggtatctcccttgtcatttctgattgcgtttattccattcttctttctttccttctatattagtctagctagtggtctattttattaattttttcaaaaaataagctcctggattcattgattttttaagggttttttgtgtctctgtctccttcagttctgctctgatcttggttattttttgtcttctgctagctttggggtttgtttgctctttgaactggttttagtatcaatattgtactagcttcataaaatgagatgaggaatgtttctagtttttccattccaggaagaaaatctgagtaaaagtggaattatctgtcccttgaatgtttggtagaatttactggtaaaaccaaatgagcttgatgttttatttatgggaagattttaaattattgattcaaattatttaatagttgcaggactatgtaagttattttatttcttttttattgagttttggtaatttgtatttttgtagtaattttccacttggtctacgttttccaatttattgatataaaattattcataataattccctattatctttttaatctttgtgattttgtcccatttttcatacctaatactgcctatctatctcttttctttatcttgatcaatctgactggagatttgttagttatttcaaagaatccatttttggctttgttgaccaaactgtgttttatctttgttttcagtttcattaagttctgctcatgtcttcatttctttctctccactttctttgttttttttctgtctttcctcctaacttctaacttattttctaatataagcgttgaaggttatacatttttctacttttttgtgtgtgggaagtacaaaaattgtcaattgggaatttcgaagtagagaaaaatatttcattctgacttttaaattgccactgtcaattgtgcctaaaattcatagtacttaccatgtcaaacaatatgattttgatatgtacctgggaaaattatgcttactaatgtggttttaatttcatcatgtttcatataggattcacctttatttgatcttattaaacaatcaaaggaccgagaaggaccaactgatcaccttgaatctgcttgtcctcttaatcttcctctccagaataatcacactgcagcagatatgtaagcaaaatatatgttatgttgaccattcaaactgcaaatagattttaagcataagtgcaatgtaacattctataaagaaactgtagggaatagaattttgaataagaatagtttctgtttttaagaaattagtaataaaaggtacatgacccaaataaagtcatataaaagagtacagagtgctactgaatcacctaggatttgcataatgagagcagttttcatggcagagttggcagtttaggtggaataggatttcaatgtggaaactggagagaatagaggagacagaggagtgtgttccaagagtcagaatggcattaactcaaaaatgtcaaaggaagcagaaaacatttttcagagtgtgcaggtcagtccatttggagtgaagcataggataagtgtagggagaagtatgggatgtggactaacacacagttgattagtgtgtgctggtgatgacgatgggaaaagaaaatgtaaacccaaatgtatctgaaacaggtctcaatcaatgtagtagtttattttgccaaagttaaggacgtgcccaggagagagatctgtgcctttctccagtgatgattttgagggctccaatatttaaatgggaaagtcagtctggaggggaaagaaaaagggtatggtaatccacatgttgcaagagaaaaagagcaggtagaggaatcgtcaattatctatccatctcatgctgagtgaatcgacattttacataagataaggtgaacatagagtcactgtctgtggaggtatttaaccttttatctgtatttatttgtgtgggaacaaaaggaaaggcagtttcttgcatgactcagatttcagcttaattttttccttttggcatagtgaattggggtcccaagtgtttattttcctttcacaaaagcaatcactaactgtgtgctgggcaatggcctaagtacttaagatttattttttcatttaatcttcataacagcccataaggtaacagatactgctgtcagcctgttaactataaaataggaattagagaaataagataacttgcctaaggtcaatagaattcaaacccaagctatctaatcccaaagtctaggctcttaatcactctaactacattgcctttcacagaaatgtgcctaatattttgtttctgtttaattctgtgtaggaactgacattacagtattctgtattagtgcaggggccattttccagagatgtcattttcatgctaacttgtacccaaagtgtttctggcatatggagaccctgccttcatgtatacatttgtttcctaagtaatgcattgtataaataagttaagccttgtttttttaaaattcaagaagcagtcatctgtaaactgccaggaagtggtgtaggcactgggaatacagaagtaagatggcctgggtccttcccctcatagagcttacattctggaggaggaacacaggcaatgaacaagtaaaccaagatgtaagatgattttagagtataataagtgctacaaaggaaataaacagagtggtgtgaaagagagaaacggagaggctgatagaatgcttagtggcactttcctttctctgataaagtgatattttgacgtcacacctgaagggcaagctgatgctagctaggcaaaaacctgcatgatgtgcattccaggcagaacaaacagcaagtgcagtggctgtagggcagatcaaacttagctggatttaggaacagaaagaaagaaatcctagtgtggctggggtattggaagaggagaatggtgcaagatgagactgaagagctaagctggggtagatcttgtagagatctccactctctagctgctatctgaagtacaggtgggtttggaggaaagggacagggcaaggcaaaaagcgaggaaaccaatttggagactatttctgtagttcagatgagggatgtaggtgacttggtctaaggtatggtattagaaatagaaatggagagatctggggtgtatttagagataaattaataggttttacattggttttatgttggatttcaggaatttggaaaatggagaaattaaaaataaccctaggtttttgacttaagacactagatgtaatgtggagctattctttgagatgggaaaataaatccagagctctgctttgttcttattaagtctgagattcgagtagttatatccggtaggtaattggagatttacacctagaacttcagagactaactttgcccaagttaggccagtttacgatactgtcagtgaactgaatgaaaatccaaagtggatactagaccagacactggtccttctaaaatcattgtgataatgggtcgcttttcttagtgtactggttaatatactacgtgttgtagaaacatccatagtaaggtacaaattctacttcctgttctctttgttcttaaagtttgtctttaaaaataagttcatttgccagctaccaaaagaaaatcagaaagtagatctagattattctgttaaataggggcagcacagaatgataatatttgtaatatctctgccttgagttatgcctgacatatttagtatggtgtaaatctgtctgaataatgttatttgaagtattaattcatagaattctgtactgtgtaatttaggtgtgtgtaaatctgtgtgtataactgaaatcttagatatgaaccatagttatcgctaaaaaaatttttagaaggagaatcacaaaaacaagataacagtatttaatatcaataaattgttttttaagctggaatcaccttatggtctcaataccactataattattaaaattgtacattatacatatatagctatttttttctaataaggcagtaatccccaggaaaagccatttattaaaatagaattagatatgatgatgacaagcagttttcctattaatatatctttcccagcttgcatttaaatagtctgctataataccaattaaatagacaagatgtatctgggtgtacaaccttgaagtgtatgtataatctgtgattcttagccaacttgaaatgaagacttttcctttaaatatatctaggtatctttctcctgtaagatctccaaagaaaaaaggttcaactacgcgtgtaaattctactgcaaatgcagagacacaagcaacctcagccttccagacccagaagccattgaaatctacctctctttcactgttttataaaaaaggttagtagatgattattttcaagagcatggactctgaaactaggctgactgggttcaaatcatgtttcttctactttctaggtacattactgggcaagtcacttaatatctctgtgtctcagtttcctcatctataaaatggaaatgataatgttgcgagatctttcttgactattcagagtcgtttttctggccggaaacctctgtgaccggtggcgcccttgatcaatttttgctcaggcccaccgggctcatttcagccccttggtctgacaggctgcactcggctcacactaccggcctgggtccatgccagccaggagcaagtcagacatggaacggagaggggtgtgtgggcaagcatgagatctggccattgcccacagtcagaaatgctggctgctgcagcggggcgggcagctccaggtgctggcacaggtgccaactctctgtgaggctgcacctggaccagacacaccacaagcggtttccacagctggcactggggaacaataaaatggctcccagaagcttggagacgccagaaaccacagggccccaaagagggagtcacagccctggctcaaggagctcccaattctgggctccccgaagggccgcagctcttctctcttctttacccacaacatggcgagcaaggggcatgtttcagccctgtttgtgttacagccctttcagcctcgccatttggtgggtcctgagttcttgtcctgcagccaggaagaatgaggtacacagacaagtggagggtgagcaagatgaagaggagatttattgagcaatagaacagcttagagaagacccatagtgggcagctcctctctgtaaccacaaagtcccgatgagtgttcagctcctagcagagaaggtagctcctctctgcaggcaggtcgtcccaacaagtgttcagttctcagcagaaagggtagctcctctctgcagctgctcgtcctgacaagtgttcagctatcagtagagagggtagttcctctctgcagctagttgtctctccatcctctgctctgctctgcctgagactcgggcttctgtgggcctcagcgggaagaaagtgtgcaccgattggtacatgggcggccactagtgggcccagaaaaggtaccacaagtcctcactcctgtccgtgggactggcagcgcccacccccagccttcaggcgctccctggcctgaaggtggggcctcaacagggactcatcctctactgctcaggagcccatctgcctcctgccgccatccatgcgtcaaggggcacctgtaggccagtgccaagctgccctcagcccccgcctcggcttcccccccgtgctcgtcagcgcccaaagtctggagagggctgaggcggcagggggctggcgtgtcagcgctgccttgagcgtgcgcacatctggctgggctgcagcagcacccaggctcagccctgactttgctccgagattggagtgggcgctggcagcagggagaaaccaggcagtgggagcaggcacttctgagcctgcgagggcggtggcagttggggggtgccttccccggcccccaagtatacagagatgcctgggtccacagccacggtttgggtagctgcagctgcactggggagggtgggactcctacctgctccccagcccagagagcacagggatgcctgggtccgcagcggtggcttgggcggctgcagaagcactggggagctcctgtcccaactcggaaggggcggggttcctgcttgtccccggctcctccgggcttcctggagcgtgccgccccatccacgcctctctgctgcagcaggtgtgatgtacatacaaaagtagtgtgttgttgcctactgcagacacatttcctggatattttcaggacatttaagaaggccagtaaccaggtcatgtagcattctctgagtgtgtatatatatggtggggtggggaggttgatttgagtgtctgtgcatgcgtatatacttcctagtgcatatccacttggagctctttgaaagacagtaaaaggtcatgttcctccatgataatctttttcctgattttattcaagtaagaattatgctgagctttacaggcatattgtcagatattatccttaggttagagcagtggttttcaaagtgtcgttcccaaccagcagaatccacatcacctggaaattgtagaaatgagaattctggggctccagcctagacctgctcaatcagaaactcttaagatagggccctcaaaaccttgttttaacaaccctccagctaagtctgatgtatgctaaagtttaagaccactgagataaattgttagctttaaaaatttcaaattacctcatgcaagtcgttgaaagagatatataaaaggtctttatatgatatttaaagtagatgaaggaaaattcaattttatggattcctttttgccaaatttgcattttcagtagtattttttataaactaaataaattacatattgcagtcattttacatataggtaatctacaagtttaccatttttcaacagagtatgttccattggtattttatagagaaatgtgtggtttaatttttttaggattggaaaaattcatagacactggcaattatataatttaaaaaaatgattattcctctttaatattgatagtgggaatgaccagtggtgagtgattattaatagaattgaaacaaaccctattgggtttgtctaattttacagtgtcttatgacctttcctccactacttcccacctctgccccaatttcatgccataatagttaattcagcaagtatcattctgccttatatgtacctagaaatgtgctaacacaaggaatcaattatttttaaggaaaatagtggtagaaaaatcttaaacatcaccactaaagaacttattcatgtaaccaaacaccacctgttcccccaaacacctattttttaaaaaaactcatgcctacataatgaagcctccataaaaactcaaaaggacctggttctgggagcttctggatatttgcccaactggaggttcctggagaatagcatgcctggggagggcaaggaaaatccatgccccttctcacatgccttgccctctgcatttcttcatctgtatcccttgtaatatgcctcataataaaccagtaaacatgtttctctgggggaaagaaaagagtggtagaaaagaggtttctgttaaaatgctacttaacagcattataattagagcaatttcatgatttgaaaaaaatctacttgtaattcaaaatgaacagtaaaaatgactaatttttcttattcccacagtgtatcggctagcctatctccggctaaatacactttgtgaacgccttctgtctgagcacccagaattagaacatatcatctggacccttttccagcacaccctgcagaatgagtatgaactcatgagagacaggcatttggaccaagtaagaaaatcaagcacttcaccttctctcctccctacttacttgttaactgatttctttctttctttctttctttctttctttctttctttctttctttctttctttcttttctttcttttctttctttctttctttcctttttttttttttgagatagagtctcactctgttacccaggctggagtgcagtggcgcaatctcggctcactgcaacctccgcctcccaggttcaagtgattctcctgcctcagcctcccaggtagctaggattacaggcgtgtaccaccacaccttgttaatttttgtattttagtagagacaggttttcaccatgttggccaggctggtctcaaactcctgacctcaggtgatccgtctacctaaggcctcccaaagtgttgggattacaggcatgagccaccgcacccagccttgttaagtgatttctaaagaaaatattagattcaaatgagaaactagatcaatttattagacttaatatatgttcactttttggctaccatttacatttttgttgtaattcttacaaattagagctttaacactcaagagtatattttagtaactgcttatttaatgacacaaaagatcttacctgtaaaaaaaatagctgaagaaccttcttatcattggctttttctatgtagtagtgagctagatatcattttagtgtgaaaaaagcatgagacttaagaatcagttgatttaaaacaatacctattgaatgaatgaatgaagtcaattagtttacaatgagagaatcatttttcatctcctcctttttctctataaaataggttaataagaacaatatacttttggctgggtgcagtggctcacgcctgtaatcctagcactttgggaggctgaggtgggcagatcgcttgagctcaggagtttgagaccagcctgggcaacctggcaaaactctgtctctacaaaaaatttaaaaattagccaggtgtggtgacttgcacctgtggtcccagctacttcggagactgaactgggaggatttcttgagcccaggaggtggaggttgcaagtgagctgagatcacaccactgtgctccaacctgggtaacagagcaagaccttgtctcaaaaaaattttgttaattaaaaaaatatatacatatatagttaatagctttactgaaataattcacacaccataaaaaccacccatttaaaatgtacaattcagtggtttttagtatattcacagttacacaaacatcaccacaatcaattttagaatttgtatcacaccagaaagaaactccataccctcaagcagtcaccccctattcccctaccccctcagcccaaggcaatactaatctattttctctctatggatttgcctcttctagacatttcatatacatggaattatataatatgtggtcttttgtgtatggcttctttcatttagcataatgttttcaaggttcatctgtattgtagcttgtatcagtacttcattccttttcattgccagacaatattccattgtatggatatacaccacattatgcttatcattcataaagtgataaacatttgggttgtttccactttttggctattatgaataatgttactgtgaacattcatgaacatgtttcatttctcctaggtacatacctaggagtagaattgctaggtcatatgataattctatgttaactttttgaggaatgcccagatcattttccaaagtggctataccattttacatgcctaccaataatgtatgaggttctaatttctctatatcctcaccaacttttttatcttttttttttaataatagccatcctagtgggtataaaatggcatctcagtgtggtttgatttgcatttctctgatggctagtgatggtgagcaccttttcatgtgtttactggccatgtgtatatcttctttagagaaatgtctatcagaccgtttgcccattttattttttatttattttttttatttttgacacggagtcttgctctgtcgcccaggctagagtgcagtggcacgatctcggctcacggcaatcttcgccttctgggttcaagcaattcttctgcctcagcctcctgagtagctgggattacaggtgtgtgccaccacacctggctaatttctgtatttttagtagagacggggtttcattatgttggtcaggctggtctcgaactcctgaccttgtgttccacccgccttggcctcccaaagtgctgggattacaggcatgagccaccatgcccagcccattttgttttgagacatggtcttactctgtcacccaggctggagtgcagtgacatgatcacagctcactgcagcctcgaattcccgggctcaagtgttcctcccacttctgcctcctgagtagctgggactataggcacacaccaccacgccgagctaatttttgtatttttttgtacagatagggttttgccgtgttgctcaggctggtcttgaatggttgagctcaagtaagccacccaccttggcctcccaaagtgctaggattacaggcatgagccaccatgcccagactgctcattttttaatagagttatttgtcttgttattattgaactgtaaggggtcattatgtagtctacatacaagtcacttatcacatatataatttgaaaatattttctcccattctgtgagttgtttcactttcttgttagtgtcctttgaaacacaagttttttattttgatgatgtccaatttatgtagttgttttcttgttattgatgctttagtgtcatatctaagaaaccagtgccaaatctgaagttgttaagatttatccctgttttcctccaaaatgtttatagttgtagttcttacatttaggttttgctccattttgagctaattttttaatatagttgaggtaggggtccagcttcattcttttgtttgtggataactagttgttccagcaccattttttgaagagtttttttctctcttcattgacagttgtcaaaaaatcagttgactgtaaatatataagtatttatttctggactctcaattctgtttcatatgagatctacataagctattcttatgtcaggactacactgtacacttggctgtaggatgccaagcaaaaatgattatttggcattcttggcaatagtaggtaagagcaagaatgttgcagaagcaatgagtacttaaattaggctataaagttcatacaaataaagaaaatctgacattttaaagtcacagggaatcattttcagatcttatttttgcatttaaaatatcttttattgaaatgtaatacacatatgtaaaaacctgtgtatcaaaagtatacattctaacaaaaattcatcaactgagcttagttatataaccagcatccagatcaagaaacaaaacattgtcagcaacacataagactctcttacatgctcttccagtcaccatagcctccttaccaccaccaccaagtgtgttcaatattattttatctaatagtttgaaacattttcacacctggctttttaaagtgctagttatacaaaattaactgattctactttcaacttttctgggaaacatttaagggacaagagccaaagttagggtaatttacaaaccaggtgatcagtcctgaataattgagccttggtgatttgcattttgttctttaaacacactttgggttaaacacttcatgtagactttcaaactgagctcagtatggaaagaaataactctgtagattaaacctttcttttttgaggctaaaagaaagaaaatggtattttttaagaacaaaaccatgtaataaaattctgactacttttacatcaatttatttactagattatgatgtgttccatgtatggcatatgcaaagtgaagaatatagaccttaaattcaaaatcattgtaacagcatacaaggatcttcctcatgctgttcaggaggtaggtaattttccatagtaagtttttttgataaatccatatccataacataacataggtaattcatttgatctcatttattcattaatgagatcatatattctgtctgaccttattatgtaaattcacaaataaaaacttttatattatttatttgtaacttaaatagaattggaaagataagggtaattatgaaattacccatattcatagttttttataaagttaataaataatattttatccctgtaataagcaggtatttgtaataaacttgacatgagtcatagaacattagatattctttgaagttatttttattactttataggaaaagccagtataaatgcagccttgcaaatcaataatacaaatgttcagtataaacacattttgtgtttccggtttaccttccctttagagaaatagtagtagtaaaatatacttggtatgacacatttcatattgttctgtggaaagtgagttgtggggtatttttcccatttattattggagttttcaaaagtaatacaaaccaagtcatttttgtttgtatgtttgaagttattttctaaattcaatcattttaattgtatatatcagaggcatctgatataacctctgtgtttttccctaaaatttgagtgaaatctaactatcactaaaatatagtgcttttactaaatgtctacttcttgcaattgcataatgtatactgaaacccttatagattgggggggataccgggaggtacaggccagagaatgtagtccaaatattggtggataatattattggctttcgctcagctctggccctttgattcccatcatgctttccattctaccagtctatctactcctctcttcccagtctatatactcttctcttcttggatggccagctcttccatctgctgctgcctggctatttctctcaatcattctgtgacatttcacttctagaagagcagctataatccaagcctaagaagtaattttatttatttattattttttcctttataatatgtgcttcttaccagtcaaaaagtattataaactattagaaaagaaaatctaaaggtagaaattttaaaattcatttaacaagtaaattttacttttttttttttttttttttttttactgttcttcctcagacattcaaacgtgttttgatcaaagaagaggagtatgattctattatagtattctataactcggtcttcatgcagagactgaaaacaaatattttgcagtatgcttccaccagggtaggtcaaaagtatcctttgattggaaaaatctaatgtaatgggtccaccaaaacattaaataaataatctacttttttgtttttgctctagccccctaccttgtcaccaatacctcacattcctcgaagcccttacaagtttcctagttcacccttacggattcctggagggaacatctatatttcacccctgaagagtccatataaaatttcagaaggtctgccaacaccaacaaaaatgactccaagatcaaggtgtgtgttttctctttagggaagtagtaaagaatgagagggggattattttgatccaagaataaaaaatataaagcattcttcatttcaaataagctagactcttgaaactctatttgcttatttaagtaacataataagaatatgggggcggggtgaagaaaatctatttacgacttaagcaacgcaagatggccgaataggaacagctccggtctacagctcccagcgtgagcgacgcagaagacgggtgatttctgcatttccatctgaggtaccgggttcatctcactagggagtgccagacagtgggcgcaggccagtgtgtgtgcgcaccgtgtgcgagccgaagcagggcgaggcattgcctcacctgggaagcgcaaggggtcagggagttccctttccgagtcaaagaaaggggtgacggacgcacctggaaaatcgggtcactcccacccgaatattgcacttttcagaccggcttaagaaacggcgcaccacgagactatatcccacacctggctcagagggtcctacgcccacggaatctcgctgattgctagcacagcagtctgtgatcaaactgcaaggcggcagtgaggctgggggaggggcgcccgccattgcccaggcttgcttaggtaaacaaagcagccgggaagctcgaactgggtggagcccaccacaggtcaaggaggcctgcctgcctttgtaggctccacctctgggggcagggcacagacaaacaaaaagacagcagtaacctctgcagacttaagtgtccctgtctgacagctttgaagagagcagtggttctcccagcacgcagctggagatctgagaacgggcagactgcctcctcaagtgggtccctgacccctgacccccgagcagcctaactgggaggcaccccccagcaggggcacactgacacctcacaaggcagggtattccaacagacctgcagctgagggtcctgtctgttagaaggaaaactaacaaccagaaaggacatctacaccgaaaacccatctgtacatcaccatcatcaaagaccaaaagtagataaaaccacaaagatggggaaaaaacagaacagaaaaactggaaactctaaaacgcagagcgcctctcctcctccaaaggaacacagttcctcaccagcaacggaacaaagttggacggagaatgactttgacgagctgagagaagaaggtttcagacgatcaaattactctgagctacgggaggacattcaaaccaaaggcaaagaagttgaaaactttgaaaaaaatttagaagaatatataactagaataaccaatactgagaagtgcttaaaggagctgatggagctgaaaaccaaggctcgagaactacgtgaagaatgcagaagcctcaggagccgatgcgatcaactggaagaaagggtatcagcaatggaagatgaaatgaatgaaatgaagcgagaagggaagtttagagaaaaaagaataaaaagaaatgagcaaagcctccaagaaatatgggactatgtgaaaagaccaaatctacgtctgattggtgtacctgaaagtgatgcggagaatggaaccaagttggaaaacactctgcaggatattatccaggagaacttccccaatctagcaaggcaggccaacgttcagattcaggaaatacagagaacgccacaaagatactcctcgagaagagcaactccaagacacataattgtcagattcaccaaagttgaaatgaaggaaaaaatgttaagggcagccagagagaaaggtcgggttaccctcaaaggaaagcccatcagactaacagcggatctctcggcagaaaccttacaagccagaagagagtgggggccaatattcaacattcttaaagaaaagaattttcaacccagaatttcatatccagccaaactaagcttcataagtgaaggagaaataaaatcctttacagacaagcaaatgctgagagattttgtcaccaccaggcctgccctaaaagagctcctgaaggaagcgctaaacatggaaaggaacaaccggtaccagccgctgcaaaatcatgccaaaatgtaaagaccatcgagactaggaagaaactgcatcaactaatgagcaaaatcaccagctaacatcataatgacaggatcaaattcacacataacaatattaactttaaatataaatggactaaattctgcaattaaaagacacagactggcaagttggataaagagtcaagacccatcagtgtgctgtattcaggaaacccatctcacgtgcagagacacacataggctcaaaataaaaggatggaggaagatctaccaagccaatggaaaacaaaaaaaggcaggggttgcaatcctagtctcggataaaacagactttaaaccaacaaagatcaaaagagacaaagaaggccattacataatggtaaagggatcaattcaacaagaggagctaactatcctaaatgtttatgcacccaatacaggagcacccagattcataaagcaagtcctgagtgacctacaaagagacttagactcccacacattaataatgggagactttaacaccccactgtcaacattagacagatcaacgagacagaaagtcaacaaggatacccaggaattgaactcagctctgcaccaagcagacctaatagacatctacagaactctccaccccaaatcaacagaatatactttttttcagcaccacaccacacctattccaaaattgaccacatagttggaagtaaagctctcctcagcaaatgtaaaagaacagaaattataacaaactatctctcagaccacagtgcaatcaaactagaactcaggattaagaatctcactcaaagccgctcaactacatggaaactgaacaacctgctcctgaatgactactgggtacataacgaaatgaaggcagaaataaagatgttctttgaaaccaacgagaacaaagacaccacataccagaatctctgggacacattcaaagcagtgtgtagagggaaatttatagcactaaatgcctacaagagaaagcaggaaagatccaaaattgacaccctaacatcacaattaaaagaactagaaaagcaagagcaaacacattcaaaagctagcagaaggcaagaaataactaaaatcagagcagaactgaaggaaatagagacacaaaaaacccttcaaaaaaatcaatgaatccaggagctggttttttgaaaggatcaacaaaattgatagaccgctagcaagactaataaagaaaaaaagagagaagaatcaaatagacacaataaaaaatgataaaggggatatcaccaccgatcccacagaaatacaaactaccatcagagaatactacaaacacctctacgcaaataaactagaaaatctagaggaaatggatacattcctcgacacatacactctcccaagactaaaccaggaagaagttgaatctctgaatagaccaataacaggctctgaaattgtggcaataatcaatagtttaccaaccaaaaagagtccaggaccagatggattcacagccgaattctaccagaggtacaaggaggaactggtaccattccttctgaaactattccaatcaatagaaaaagagggaatcctccctaactcattttatgaggccagcatcattctgataccaaagccgggcagagacacagccaaaaaagagaattttagaccaatatccttgatgaacattgatgcaaaaatcctcaataaaatactggcaaaccgaatccagcagcacatcaaaaagcttatccaccatgatcaagtgggcttcatccctgggatgcaaggctggttcaatatacgcaaatcaataaatgtaatccagcatataaacagagccaaagacaaaaaccacatgattatctcaatagatgcagaaaaagcctttgacaaaattcaacaacccttcatgctaaaaactctcaataaattaggtattgatgggacatatttcaaaataataagagctatctatgacaaacccacagccaatatcatactgaatgggcaaaaactggaagcattccctttgaaaactggcacaagacagggatgccctctctcaccgctcctattcaacatagtgttggaagttctggccagggcaatcaggcaggagaaggaaataaagggtattcaattaggaaaagaggaagtcaaattgtccctgtttgcagatgacatgattgtttatctagaaaaccccatcgtctcagcccaaaatctccttaagctgataagcaacttcagcaaagtctcaggatacaaaatcaatgtacaaaaatcacaagcattcttatacaccaacaacagacaaacagagagccaaatcatgagtgaactcccattcacaattgcttcaaagagaataaaatacctaggaatccaacttacaagagatgtgaaggacctcttcaaggagaactacaaaccactgctcaaggaaataaaagaggacacaaacaaatggaagaacattccatgctcatgggtaggaagaatcaatatcgtgaaaatggccatactgcccaaggtaatttacagattcgatgccatccccatcaagctaccaatgactttcttcacagaattggaaaaaactactttaaagttcatatggaaccaaaaaagagcccgcatcgccaagtcaatcctaagccaaaagaacaaagctggaggcatcacactacctgacttcaaactatactacaaggctacagtaaccaaaacagcatggtactggtaccaaaacagagatatagatcaatggaacagaacagagccctcagaaataatgccgcatatctacaactatctgatctttgacaaacctgagaaaaacaagcaatggggaaaggattccctatttaataaatggtgctgggaaaactggctagccatatgtagaaagctgaaactggatcccttccttacaccttatacaaaaatcaattcaagatggattaaagatttaaacgttagacctaaaaccataaaaaccctagaagaaaacctaggcattaccattcaggacataggcgtgggcaaggacttcatgtccaaaacaccaaaagcaatggcaacaaaagccaaaattgacaaatgggatctaattaaactcaagagcttctgcgcagcaaaagaaactaccatcagagtgaacaggcaacctacaacatgggagaaaattttcgcaacctactcatctgacaaagggctaatatccagaatctacaatgaactcaaacaaatttacaagaaaaaaacaaccctatcaaaaagtgggcgaaggacatgaacagacacttctcaaaagaagacatttatgcagccaaaaaacacatgaagaaatgctcatcatcactggccatcagagaaatgcaaatcaaaaccactatgagatatcatctcacaccagttagaatggcaatcattaaaaagtcaggaaacaacaggtgctggagaggatgtggagaaataggaacacttttacactgttggtgggactgtaaactagttcaaccattgtggaagtcagtgtagcgattcctcagggatctagaactagaaataccatttgacccagccatcccattactgggtatatacccaaaggactataaatcatgctgctataaagacacatgcacacgtatgtttattgtggcactattcacaatagcaaagacttggaaccaacccaaatgtccaacaatgatagactggattaagaaaatgtggcacatatacaccatggaatactatgcagccataaaaaatgatgagttcatgtcctttgtagggacatggatgaaattggaaaccatcattctcagtaaactatcgcaagaacaaaaaaccaaacaccgcatattctcactcataggtgggaattgaacaatgagatcacatggacacaggaaggggaatatcacactctggggactgtggtggggtcgggggaggggggagggatagcattgggagatatacctaatgctagatgacacgttagtgggtgcagcacaccagcatggcacatgtatacatatgtaactaacctgcacaatgtgcacatgtaccctaaaacttagagtataataaaaaatataaataaaaaaaaaaaaaagaaaatctatttacttggatgggtttacagatttagttatcagctttcctgactgttaggtatcttcttttgagaacaatttgagaaccagtttggttatatgtttcaaaacacttttatattttttaaatagccaatctgctaaacaaagcaggttactttaggttgagtacttttagtttgcagtttattggatgtcctgtaagttttgcttcctgtggatttttttccttttgcttgttatattaaatgtagattactgtcaattaagtctttagaggtccatccctaatcctgctggcggcctctttaccacctcaccttgggcaggtctctatctgtacttcacaagggtgctgtggatcagggaaatgatgagtatgaagctgttttaaattctcagatgaaaggttgtatgcaactacaaatcattatattatcttccacatccaaccacaagtgctctctagctttgaagtgcttcagttgactaattatatgttatcatgggctatttgaaactgactttatttgtgtgaagtaggaggcagattagctagtatagttaatgtagtctcatctcagaaattatcagcccatatggttgtacctaatgggcaagaaaagggggcatatgttggcctttcagaaaatatttgcatggtatatttaattatttaagtagtacgtactcattataaaaatttcaaactctacagaaaaatatgaagtaagaaataattggcaatatgatacaaatgctctcatgtgtctctgtatcatcctttatttatttggtgttcttgtagttggatatctgtgtactgatatctactacttgttctaagctgctaagatgccacgtcatgtctatttaagaaaatttacattgttccatgccactatatgaaaatgtatacttaggtagttttttttaatagtgataattagtccatattatggtgataatgatggctacttgctgatccttagtgaaataaattctgtgttggtattcttcagcaaaaacgtcacattctgaacatcctaactaataaatcattgaccaggcattaggagagcatcttaacactctacccagtacatttaggtactctggttaatcaaatattatatgtagagtgatggccacttatcaaggaattggagggcaaaaaaatctctatattcactagttccatgttcatgttttcaaatctttgtcgagtcatgtcaggctaatgatgttcttcagctttattataaagaacataaattatatggttcaaataaagacagactaataaagatttctgactctatgatatatgataaatagcctttactatatcaatatagatgctaattagaattctgattattacttaatattctaagttttttccaaatataacttgaattttaaatgagaaaatatgaaagaaatttgataacttacccattgatttatgaagaactaagtaggggtaaccttgaaacttgcctttgccctccctaaatatgggcaatggcagaatatgttcttgcagacctataacttttgctttaaaactaagagactaggtgagtatatgattagacgggcactgttagaataattcccaaatgaatatagtttgtcagtggttctagggtagaggtaacctttaatttggtattcctaatagttcagaatgatgtatttatgctcatctctgcaaaattgtatatggttttttattactaattggtatttcatcttaacttgacagaatcttagtatcaattggtgaatcattcggggtgagtattttctttctatgaaatataatagtatgcattgtaagtataaaagaaattaaagctttctataatttgaatttccaaatgcagttattcaaacacctcatccaggcatattgcatagaattttatgagatatatatatctcagatttactttcaaatcaagtttaatctcaaatcatactcctaattggtgaacttcaaaacttttctaaatatccacttgagattatataatacatatatacatttgtgtatatacatacatatatacgtgagctgtttttgctcacaacatttctatcaccaaatgtgtgagatttttttctcacccaaatctattcttcaactctctggtgttctacaattcaattcaattctgacactaattacccagagtcagcatcagactccacaggttcaagggctcagtcccacaaaaatggtctcactgcagacaccagtcacaagtgtcaggtccccaggctacaccacacttccgtctgacttgaatacgaagttggggggttccgatagtgcctcttccttacagtttgatccactgccagaactactcacaaaactctggaaaatattctacttactattatcagttcatcataaaagatacaaatgaacagccagatgaagaaatattatatagggtgaggtccagaagagtccctagcacaggggcttctgtccctggggagttggggtgcaccaccttcctagcacttagacatgtttaccaactccaaagatctcccaaccttattgttgaggggtttttatgggggtttcattatataggcataattgattaactcaatttccaaccccctcccctccctggatagagggtggggctgaaagttccaagcttctactcaagacttggtctttctggcaaccagcttccatcctaaattagctaggtacccaccaagtatcacctcattagaacaaaagatggtcccatcacccttatcacacatgaaattcgaagggttttaggagctctgtcccaggaaccagggacaaagaccaaatatctttcaatgataccatgtatgtatgtacataacctcacaggaatgtttataaaacaattttgaaattcactcattatgagtgtgatttgaaatgagatactccaaaatgtaagcccgatatccaaatgtcaccagcctgtccctgcctactggtctccttccatacatatgcagtttttgcttgtccttcctctcagacttctaggatattctttttctggtacactgattaggaattgtttgcatgagatcctgcctcagtgaaagtggcagagcttcattctaggagatccaagggaaagctttgctttgaaacatttattctaggctgcaaatccacaaccctagttggccttccattaaagtcactaattcagcagtcccatattcaatatgcattactgttaatatgttgcaccatctccattcccctgagagcttatatttttaatttttaaatttttatttttagagacagtgtctcactctgtcacctacttattataacctcaaactcctcggcccaagcagtcctctcaccttagcctcccaagttgccaggactacaggcatgcaccaccatgtccagctaatttttaaattttttgtagagacagggttttctatgttggccagattggtattgaattcctggcttccacgataccccgtctcagcctcccaaagaactgggattacagatgtgagccactgcacctggccagagagcttatattcttataggaatgggaagactgcctatgttatgtgttgctacataatacattacccccaaacttagtgacttaaaacaaacgcttattatctccatttctgtgggtcaataatctaggcatgacttagctgggccagagtttctccaaagtctgtgatcaaggtgtcagttgggcctgcagtcatctcaaggctccactagaggagcattcactggcagacttattcaaatggctgttggctgatcctcgatggctattggcccctctattggtttcttgcccttgggcccctccatagtactgcttgctattcacaacatggcagcttgctttgcccagagcagggactctgagggaggcagggaaataaagagcaagagagaggtcacagtcttattgtaatctaattctggaaatgacagcccattacttttggcatattattttggttagaagcaagacaacagtagatctagcccacacacgaggggaggaggatcacacaaggaggtgaataccaggaggtggggtcattgggagccatctgagaggctgcccaccacactgcctcaagtaactagggagaggtaaaagtttatatgccagatgaccaaatattaaaatgtgtgttacaaatagttcacgatgggctcagctgtcagactttacaaaggagctatgggaccttataaggacagttggaactggctaggtatcacatagtggtcttcaaacatttttgcttgccataacctctaaaataattgggaaaaagttgaatgtacttccatatcttaaagctgataatttaaaatattatacatttaatagcagcacgggatttagtttttgttaaattgtatatgtgctccaaatagatttaccatcaaaacctgttttgaatttaatattgggagaattcgctagtttaatttttggaaaataaagtataattggcaaagctaatcctcactgttgaatctatccgtcaaatcagatataatttctatcagaaagtctatatgacttgtcaacataatacccataaagtgaatcaaaaattattattcattgaacacatcatctcttatcaaattcttgtgaccttccttctggttgtataatagcctaaaaaacaaaaaaaggacaaaagcaagtttccagaaagctgttctgacttgcctacttctgaaaagtagtcctgtatggtgggttctgaaaatgaggaaccaggacttgcagagtaggcagttgctggaggaagaatgtgagctgcatgggaaaagacaggaggatttacaaagagtgggtgtttaattggggatggaattaggtagttattctgatttttagatttttcatatcttttatttggtccaatgaagcagaaaatttaaatgaagttattacctttgcctgatttttgacacacctcaaactataacttgaggttgctaactatgaaacactggcatttaatgatttaaagtaaagaattctgtaatttgtagacttctgagaagttccagaaaataaatcagatggtatgtaacagcgaccgtgtgctcaaaagaagtgctgaaggaagcaaccctcctaaaccactgaaaaaactacgctttgatattgaaggatcagatgaagcagatggaaggtaggaaccagttttgaatgttttccagtagctgagatggtcatctggggaatccagagtctcagcactgctcctggcttataccaatttctttcatgccaagtttatttggaagttgtgagaatggctcaaaataatagatatgagtgtagtgcaaagttaaaaacatcttacaaattgcataccaacattcagtgaagatatctaataaaccctgatcttttttacaaagctattgataaaattttgttattcttaacattaaatttaaaaatgtttactcttgaaaaatattaaccactgtattttgtgagaaccactgaaaaaatacatagcatcataaatttgtgacatttatgttttagatggttagtttttaaattttaaaattaaaagctactcactaaaataatagcataaagtaagtcatcgaaagcatcatagttactggaaatttgagttttccatttataaatacacatgaaatgttttgcattttttaaatctgcagtaaacatctcccaggagagtccaaatttcagcagaaactggcagaaatgagtaagtacttttttcaccttgtgtaaatgaaataaacaattgtttacactgcaagaagtcttttcgttatataaaagaatgtataatttcttcagttggcaggtttgtttatgcatttaaaatataattcaatcaaggttatttatctacaaacatttgtggattaaatgtatgatgtaaaatgaaggtcatttttaccctttctatgatctttcatgcaggaagactaagaagtgaaacattgcttgaccacattcaacacaaatggctacagttagaaaatactttagcagaactacaaagaggaactatttgggagtgttagatatagggaaaagttttataaacctagcatatgtaaacatcatcacccttatttaaggaataacctttgattctaccatttttaaactttccttatttgcaaatcttaaaacaatttcaaacaaaagtttccattactggaaatcagaattttaataaagaacacttatgtcattttccaagttatacagagtgatatcatgttagggtaagtggaattctattcaaaactactctgagactagacaaaaaaaataatccaaggatagtagatggaaagcacattaggaaagagataaatgttcactaactactattgggttgtcttaggtagttatggtagtgagtgtaacatttcccagtatctgctgccagatccattgataggaaaaggaactgggattttgaaagaagacaaatattcaggagataggtgttaaaacaatcattcctaggtcacaggacacactaatgagaacaataccaattaaaatgagaggctttcttttaatacatctttgtagatactaactttgaaaataagatatttaaaaggatgctttttttctatgtatttttttaaagtgtaattaaaactaaataactaaaacaaaattttctagttataaatgaatctctttttggattttatgtcaacttacatattcctattttaactcttaaatagttgcatcttttcccctcagtacatgaaaatagacaagaggctcataaccaaaatcaggccttgaagacatatggaaacattttggaacccacaaatatgcacttaaaaaggagctgaaagctgtaaaaacatgtatattttcttagagaagtgttcagttgctatagttagtacatttcccagtgacacacttagctatgatggcgagcttcctctgccaggccaaagttcaggacctttgtgcatctacaaaattgtgacaaagcaggcagaattttaacccctgaggctaaggcatttctttaggatgctcttcagcttttcttaaagaattacatttagaaaagatcatcatacaatgctggattgcccagaatggaagggcattccatttttccaaatgtgcttctttataaagaactcatgcctacctctaaaatcaagttaagaatttttaagaaatttaataagtatcccggctttgtctatattgtaattcataatatgcttttaacatggccatgccccgggtaggcatgatggcttatgtctgtaataccagcactatgggagggcaaggtgagaggattgcttgaggccaggagttcaagaccagcctgggcaacatagcaagaccccatctttacaaaaaaatccaaaaattagccaggcctggtggcatgtgcctgtagtcttggctactggagaggctgaggtgagagaattgcttgagcccagaaggtcaaagctgtagtgagccatgatcatgccactgcactccagcttgggcaacagagcaagaccttgtctcaaaaaaaaaaaatccatgcccagtttaaatgagctatgatttgatgtatttgcagtacctgcaaggcatctgcaaacataagggaacctatagctttgtaaagaataccaccactcactctggcagattcagtctgggccagccgagtattctagtctgctgaagtatatgccaagcatcaaccacctcatctctagaatagtggcctacaaaatggggcatacctgaagtatgcaaagtcatcttttggggtacataaagtagaagttctatttatctcattttaatgtttgcttggggtatgtgttttataatttgtacatacatacgtatttttgtggtacaggcttggaaaaaaatttactcacagggatatatgatttttaaagatttggagaccactgtttttttggggggtggggagggaattttttttttaattgatatatcatagttatacatattttaggggtacatgtgatgttttgatacgtgtacacaatgtgtaatgatcaaatcagggttattgggatatatatcacctcaaacatttttctttgcattgggaacattacaattctagctattttgaaatatgcagtaaattaactgtaactccctacggtactgtcaaatactagaatgaagaccactgcttttgcaaggtcctgagcgccatcagtttgacatgagcataatatatatggcagccacttgccaacttacccagtaccatcaatgctgttaacagttcttcatcctttttccagcttctactcgaacacgaatgcaaaagcagaaaatgaatgatagcatggatacctcaaacaaggaagagaaatgaggatctcaggaccttggtggacactgtgtacacctctggattcattgtctctcacagatgtgactgtataactttcccaggttctgtttatggccacatttaatatcttcagctctttttgtggatataaaatgtgcagatgcaattgtttgggtgattcctaagccacttgaaatgttagtcattgttatttatacaagattgaaaatcttgtgtaaatcctgccatttaaaaagttgtagcagattgtttcctcttccaaagtaaaattgctgtgctttatggatagtaagaatggccctagagtgggagtcctgataacccaggcctgtctgactactttgccttcttttgtagcatataggtgatgtttgctcttgtttttattaatttatatgtatatttttttaatttaacatgaacacccttagaaaatgtgtcctatctatcttccaaatgcaatttgattgactgcccattcaccaaaattatcctgaactcttctgcaaaaatggatattattagaaattagaaaaaaattactaattttacacattagattttattttactattggaatctgatatactgtgtgcttgttttataaaattttgcttttaattaaataaaagctggaagcaaagtataaccatatgatactatcatactactgaaacagatttcatacctcagaatgtaaaagaacttactgattattttcttcatccaacttatgtttttaaatgaggattattgatagtactcttggtttttataccattcagatcactgaatttataaagtacccatctagtacttgaaaaagtaaagtgttctgccagatcttaggtatagaggaccctaacacagtatatcccaagtgcactttctaatgtttctgggtcctgaagaattaagatacaaattaattttactccataaacagactgttaattataggagccttaatttttttttcatagagatttgtctaattgcatctcaaaattattctgccctccttaatttgggaaggtttgtgttttctctggaatggtacatgtcttccatgtatcttttgaactggcaattgtctatttatcttttatttttttaagtcagtatggtctaacactggcatgttcaaagccacattatttctagtccaaaattacaagtaatcaagggtcattatgggttaggcattaatgtttctatctgattttgtgcaaaagcttcaaattaaaacagctgcattagaaaaagaggcgcttctcccctcccctacacctaaaggtgtatttaaactatcttgtgtgattaacttatttagagatgctgtaacttaaaataggggatatttaaggtagcttcagctagcttttaggaaaatcactttgtctaactcagaattatttttaaaaagaaatctggtcttgttagaaaacaaaattttattttgtgctcatttaagtttcaaacttactattttgacagttattttgataacaatgacactagaaaacttgactccatttcatcattgtttctgcatgaatatcatacaaatcagttagtttttaggtcaagggcttactatttctgggtcttttgctactaagttcacattagaattagtgccagaattttaggaacttcagagatcgtgtattgagatttcttaaataatgcttcagatattattgctttattgcttttttgtattggttaaaactgtacatttaaaattgctatgttactattttctacaattaatagtttgtctattttaaaataaattagttgttaagagtcttaatggtctgatgttgtgttctttgtattaagtacactaatgttctcttttctgtctaggagaagatagatagaagataactctcctagtatctcatccattcctagcctttaaggggctctatatgctagagatttccaaatttatttcttcagccctgatcttttcacagaggtcaaggcttttatagccaacagaactcttgattcctactcccctctacccaatgtctccaaatataaactaaaatcaaataaataaaaatcttttttttctaccctggtctttctccattttattaaacatttatcaagtcaaaaacttaggagctatctattaattcttgtctggaccactgctaaagacttctaaccagtctccctgttccctttctttctttactgtcaaactccacaaagaacaaaaatgattgtttaaaaatataaattgattcacattgctctctacttgaagtacttaacaggaattataaagcccctactgacttcccatcctcatcttgtagaattttctccttgtcactgtgctttagccacactgaacctttttctttaaaatgccaagcctattcttaccttaggcttttatatttcttcttccttctgcctggaatactcttttcccacagttttgcatagccagtgcctttctgtctttcagaactcagctcagagggcttccttgaccaccaagctaaaatcatcactgtgtattgtatcattctccttcaaaagtgtaacagcatccatctatgactatttcccaccatctgaaattgcctttcttgttacctgtctccccatccctagccactccccaccccagattgtaaccatcagcctatctattcttatttaccactttaggtctagcacctagaaagtccatctgtagagtaagaaacagaatatatgttttccatatttttccaagtatgtgacaacaaacaacactctcttcctcttttaaaatgccatgtactagtatctaccatattccaggcacagttctaaatgctagagctataacaatgaataaataaaaccaaaatccccatccttgcagaactgactttctagtttcaggcaaagagagcaaatgaatgaataaatgaggaatacatagtatgtgagattgtattaaagactgcagagaaaaacaaagcaaagaggagggcaaggaaggctggtagggaaaggagttttaaaatttaaaagagagtgatcagggaaagacttgagtgatatttgggcaaagatctgaaggagacaagagagtgagccagacacaaacaggagtcaaacattccacagagagaggtaggagtatgtctggtgtgtttgaagaacgattaggaggtcatagcaaaatgggcagcaagtatctctcttcgtctaatgcaaagtataaaaggcctttatgtatattacaagtctataatcctttatctgtagttccaaaattgagaaagctttaaaatccagtgattctgtgtgttttgtgccaaaagtcatatggcatcaaaaccatatgtaaactggcacagagctatttataatctttatcataattggaatattctcatttcactgcagaaatattaatatgtttgattgggagctaacccagacccaccttaggtgttaggtattatttggcatacgtaccatattatcattctaatcattctaaactcccccaaaattatgaaacccatctggcaccaagggtttcagacaagggattatcttaaatttatatgatttctcaaaaacatggcagatgaaattctttccttctgggacagtgacatgtttgttcctgaaagaagaaaggcaaagtgcgcagagcaggaaaagcagcaagcatatctcagtaggctgtatttatattgggcggggatcttaaatgaaatgcagtctcttaggtcacgtcaaaatcaagcagcctaaatgacactaaaaaattttgtctgcatggcagagaattgttcacttctagagatgaatttagtattccaatgaataaatactcactataataaaaggggcaaattcaaattcatatatttactttttttttttttttgagatggagtctcactcttgttgcccaggctggaatgcaatggcacgatcttggctcactgcaacctctacctcccgggctcaggcgattctcctgcctcagcctccccagtagctgggattgcaggagcacaccaccacgccggctactttttgtattttcagtagagatggggttttgtcatgttgaccaggctggtctcgaactcctgacctcaggtgatccgcccactttggcctcccaaagtgttgggattacaggtgtgaaccactgcacctggcctatttactttttcattacagctttctaaaggtacaaatggccaggaacaaactagttatactagttctattatcatctggatggtttcatagaaacttgcttttagaagtacatttttgttcctcattttagggccaatatagtatacatagcataagtaaagtttcagtagaattttcctttggactaaatagatattttacaggacgactcaaaccttacctccagaaatattaaatttccaccataggtgtagcttcttaaatagaaatatggtagcactgtataatatctacgtgagattcaaacaagctcttttaatacacagtaagcatagtcatccattctcaatactttttttgtgtgtccattatcttgggactatatatagtagtattgacatatgacaattgtcatattaaacaatgacaatacgaaaggttaaatttactacacagaccaacctcagttacttcctaaatgcaaaatgttatttttaactgaatttactgagaaaattggtaagctttgtatttctatgtgttttgacaaagattgaattaaaaataacagtaagatttgattttttcctttctcttcacaattctcccaactctgttgatgtaataaaggggggttgcataataagatagttaagattatatagtttgtagttgcatcttttcattattcttggttaagaatccagcctctaaataaaactctccatgttaaggtccagaatgactggcaatttacatgaactataacctgaagaacatacttaacattcttaacctttgttttttaaaatgaattcaatggcatcttcacaaacctctatcagcagatgagggcacttcttcattcctataaaatcttaacctttctctgtgtaaattagtggacaattattttagaagcactaaaacattgacttccttgtgtgagcaagagaggaaacaaaacttttgggaaaatctaagataaacttgtgcaaaaaaaaggatccattaatttctaatgtagtgtccttatgaaaatgtaccttttctctcatatcactaaggttcttcaaacactcatctgttagaaggaaattttaaaaaggaaatctttctccttcccataggagtgtcaatggcaagcctatcctcaaagaccagaaagaaagcatgttttttcagatagatgtacccacacccaggactcatctgtcatctctcagatctaaaactagctcttctttattgtttggcgtcagaagttttaagggctaaaccactaattctcatccttggctgaacatcaaattacttgtggagcttttaaaatgtactgaatttgggcagggcgtggtggctcatgactgtaatcccagcactttgagatgccagggtgggtggatcacctgaggtcaggagtttgagaccagcctgaccagtatgatgaaaccctgtcactactaaagatacaaaaattatctgggcatggtggtgtgcacctgtggtctcagctacttaggaggctgagacaggagaatcgcttgaacccgggaggcagaggttgcagtgagctgagatcgcgcctccagcctgctgggcaaacagagcaagactctgtcttaaaaaaaaaaaaaaaaaaggccaggcgcagtagctcacgcctgtaatcccagcactttgggaggccaaggcaggcaaattggcaaatcatgaggtcaggagatcgagaccatactggctaacactgtgaaaccccgtctctactaaaaatacaaaaaattagctgggcgtggtggcgggcacctgtagtcccagctactcgggaggctgacgcaggagaatggcgtgaacccgggaggcagagcttgcagtgagccgagatcgcaccactgcactccagcctgggcgacagagcgagactccgtctcaaaaaaaaaaaaaaaaaaaaaaaatccatagattattctgttgtgtgcagagataagaagcatgtaaacctacacaaaacaaagcttagggagcaaaacggggtaagagtccagagtaacaatctgtactctggcagtatgcctactgacccatggtggagtgtgtaaaagtagtccatttttcatcccccagtaaacttatctgttcccctttgagtgttccaatttttatatgaagtgagttcacaaaagaaaaaggcactgaggagcttcagaagaccctgtcagaaataagcaagaaaaaggaagacactgtgaagctataaaagcttggtcagctatagctagcacaggaaggtgggggagagagaccaaagaaacaaagactgtggttgtctaatggccagaacagatgctataggtgcttgccatgtttgaatgtttttttgttggataaaatagcaaacttatcaaaaaatgaaaacaaatggtataatgctacttttaaaataacaacagaataaaactatatagttttaaaaacaggattcagatttagatctagagacactcagactctgcctctaccagataaagtctgaagaaaaatggttaagcaatttgttaaagagaaactctgtccatttagtgttgctgtaacagaataactgaggctgagttaattcataaattagaggggtgtatttggctcatggttctggtggctggaagcttcaagattgggcagatgcatctgctggggacctggggctgcttcaagtcatggtggaaagccaaagtggggcagacgtgcacaaagagatcatgtggtgagaaaccaaggtcgctgaaatccctttgattttttagacagagtctcactctgtcaccaggctagagtgcagtggtgccaatctcagctcactgcaacctccgcctgccaggttcaagtgattctcttgcctcagcctcccgagtagctgggattacaggtgcccgccacttcacctggctaattttttgtatttttaatagagatggggtttcaccatgttggccaggctagtcttgaactcctgaccttatgattcgcccgccttggcttcccaaagtgctgcgattgcaggtgtgagccaccacacccggcctgaaaccccttttataacaactcagtcttgggaactaattcagtcccaagagaaccagaacccactcttgctggagggcattaatctattcacaatggatctgcccccaggacccatacacttcccaccagtccctaaggcctcccaacaccaccacagtggggatcaaatttcaatatgagttttggcaaaggacaaaccacatccaaatcatagcagaaataatggattcaaaatgtgacccaacgaagagaatgaaaagacaagccacaaactgggagaaaatatttgcaaaagacatatcagataaaggactgttacccaaaatatacaatgaactcaaaacaattttaaaaaaagatttaaaaattggctaccaatctgaacagatgcctcatcaaagaagatatgcagatagcaaataagcacatgaaaaaatactccacatcctatgttatcagggaaatgcaaattaaaacaaaaatgagatggcactatacacctattagaatggcccaaatctggaacactgacaacacctaatgctggtgaggatgtggagcaactagaactctcattcactgctcatggacatgaaaaacggtacagccactttgaactacagtttgacagtttcttaaaaaaaaaaaaatactcttaacatataatccagtaatcatgctccttggtatttacccaaaggagttgaaaacttatgtccacacaaaaacctgtacacagatgtttatagtagctttatttgtaattgccaaaacttggaagaaaccaagatgtccttcaggaggtgaatggataaactgtggtacatccaggcaatggagtattattcagcactaaaaagaaatgagctatcaagccacgaaaagacttgtggaaacttaattgcatattattaagtgaaaaaccaatccaaaaaggctatatactgtatgattccaacgataggacattctggaaaaggcaaaactatggatacagtaaaaagatccatggctgccaggagttaggggcaaaggaggaagggatgaattccgcagagctcagaggatttttagggcaatgaaaccactctctatgatacaataatgatggacacaggtcattatacatttgtccaaactcacagaatgtgcaccaccaacaatggaccctaatgtaaactatggaccgtgggtgataatgatgtgtccaagcaggttcatcaggtataacaaatgcaccactctggtggggggtgttgacagcagggaaggctgcgcatgtgtagggcatgaggcataagggaaaactgtgttttcttcacagttttgctgtgaacctaaaactgctctacaaaaatagtcttcaaaaaagtcacctcaccaataaagagcagaccaagacaataatatgaatgataattaggttgtttataagctatttgtggtctagggtgggctttcctatgagactttatccgagtaactgcttgataagagcataatatatccaatttatttatgtacatctaagagacatgaggttgacattttataattttgctgctgttttgggattaaaaaaaaccccaacacatttgttctgttatctgcaaataagcactttattaccaaatagttcagcatcagaacaagaattctaattccaaaagggtttcctttacattacatgacattgtgagatacacattagaagaatctgagactatgttccatttcagtttctcttttgcaattaggtaatttgttttgatctaaaaagtacaaatttatctcattcttgttaatgctgtccatgaaatgtaagtatcagttccttctcagctagtgctttatagttatactggtgccaggttaagagacctattttatagtgagtgacatgaaagtcaactacaagaaaagcacattgtcattttcatttacagaggcaagtccctcttaacacaaagaaaagcaaaggaccttatgtgattatgtaaggcagatcagcccaggaatttcattcaaagataatacttcatactccataatcccatgtgagaaattaatgaatgactccaagtaaaaagaaaattaaaattagcccttgggccttgacaatttaattgccagggccttttgtcaattctaaacaatgttctaaattagccacaatttctcagaatgatataccagaagaatatgaacctcaataattacaggctgttttaagtttattttgtgaaagttattccttctcccagtattccatgactaaagctgttctcaggacatactgaagatttataataaattgagtgcctattatacacaaggcactgtgctgagtgctgaaaatgtggtaaggacagacagcactccttgtcaagctatctatgtggtatcagccagctgaataatggaacatttgggccagaatagcatatactgagaccagggtaccaaaggtgtccaatttaagtgactcaaaaagaggaaatggtaaataagatatttcaattttttttccttgaccttagtcacatctgatcagaacattcaatgctttctacataaactctgggtttaggcagacaaagaccactcaccaccatccttcttctgacagttacaagtactcagccaaacatagctcatcatacatactattaattaaagagaagtgattcatctctggcttttgcaggggaaatggaaaggctcaaaaactttcctgcagatgggatcaatttttaaaggctccaactctgcttgctttgctgataaagttcttcaggagatcatggtccatttctgcaaaacctgatgtttgtgttactacagtcagatggtttatgcaaaacctgaagcagaattcttctaaatcctaggaacaacaacaaagatggtttaataaattcatatttactaattcaatgcaacatagcatgaaaatcgctaaaacaagttaggcaaagaaaaaggatttaataggcaagtggaggaaatgatggcatggtaatacctaaagaatagtcataaaaagtataacaagtatgaatcatctatgcttgtaaaaatttaagtagcacagagtaacattcaagttcctccgcactaacctaggtaaagaatctaactttttcttcccagagataggcatgtgagtgtgtgaattccttggtacctttgtctagtgacagtatttgtaactgttgatttcactttcaataattgttaaaagccctatactcctcttttatatttatatcagcgtctttaagtatgtctgcctataaagagttgatggaagaaaaaggtaagccataaaaagcagtaatgccaagaaattgctgctctgaagtcattaacaggccaccgctttttctctttatgagacgacacaggatgggatggatggatttgatcacactacatatgccttcaataatctcaactgggaaaatgctttaaagaaatcatgacttccaagtctctggtaagagagacccaacagattggtgttttctggcttactgtaatgcactctgggccaaagaataatgctgtaataattctcttgattagaactataacttgaaaatcagaatgaggctgaccagatgctttttggccctggagaagtgagggcagggtgctgagacctccaatatgcctcaaaccctaggctacttggcctaggacaagatgctgctaggtggtggtcaatttttaaaagtttcctctccaagctactgtaggtaatttataaaaaataaaagccccaaatactttctaagcaattacatatgaacattacacacgatagtcttttcttctttagacataaattatagcaaatgctgaagatggaaaaaataaaaaaaatagcaatgctgatagccttgccaatgtacatataaacctacggtacattttcttttaagaaaagaaagaaactatactaggaaaatgtttatttcatgcctgaagataactgggcaggctgttggtaccacaccagcaatatgatgtgtctctgtcccaggtaagccctcagtgataaacagggaaaattcacacacccacttgtcatcacagcatactatacataaaaatgtgcttcaatgatacatgctgaatatctcagagtccatttaaaattatgtgctgttgcttaaatttttagaaatgacatttttgcctacagcacacaaaagtgaaaccagatagagatgcatcatctctttggctgaagtctacagagaggaatggaggaattcatacctacaccacacacattagagtgtgtctggagttaggtggctgggcagtttgatgcctcacagatctggacagcatcaggaaaattgctaattaatgggagaatgaaaggaccctaaaaagttatcacttggatccatgctcctttactttattctagagtgggatcttcccctaaatactaaattaaggacaggacttggaaagagttcctgtgattctaagaattcaataaattggcataggg

SEQ ID NO: 1088 - DNA, 4617 bp, Homo sapiens
gcggttggacgcggcgctcagttgccgggcgggggagggcgcgtccggtttttctcaggggacgttgaaattatttttgtaacgggagtcgggagaggacggggcgtgccccgacgtgcgcgcgcgtcgtcctccccggcgctcctccacagctcgctggctcccgccgcggaaaggcgtcatgccgcccaaaaccccccgaaaaacggccgccaccgccgccgctgccgccgcggaacccccggcaccgccgccgccgccccctcctgaggaggacccagagcaggacagcggcccggaggacctgcctctcgtcaggcttgagtttgaagaaacagaagaacctgattttactgcattatgtcagaaattaaagataccagatcatgtcagagagagagcttggttaacttgggagaaagtttcatctgtggatggagtattgggaggttatattcaaaagaaaaaggaactgtggggaatctgtatctttattgcagcagttgacctagatgagatgtcgttcacttttactgagctacagaaaaacatagaaatcagtgtccataaattctttaacttactaaaagaaattgataccagtaccaaagttgataatgctatgtcaagactgttgaagaagtatgatgtattgtttgcactcttcagcaaattggaaaggacatgtgaacttatatatttgacacaacccagcagttcgatatctactgaaataaattctgcattggtgctaaaagtttcttggatcacatttttattagctaaaggggaagtattacaaatggaagatgatctggtgatttcatttcagttaatgctatgtgtccttgactattttattaaactctcacctcccatgttgctcaaagaaccatataaaacagctgttatacccattaatggttcacctcgaacacccaggcgaggtcagaacaggagtgcacggatagcaaaacaactagaaaatgatacaagaattattgaagttctctgtaaagaacatgaatgtaatatagatgaggtgaaaaatgtttatttcaaaaattttataccttttatgaattctcttggacttgtaacatctaatggacttccagaggttgaaaatctttctaaacgatacgaagaaatttatcttaaaaataaagatctagatgcaagattatttttggatcatgataaaactcttcagactgattctatagacagttttgaaacacagagaacaccacgaaaaagtaaccttgatgaagaggtgaatgtaattcctccacacactccagttaggactgttatgaacactatccaacaattaatgatgattttaaattcagcaagtgatcaaccttcagaaaatctgatttcctattttaacaactgcacagtgaatccaaaagaaagtatactgaaaagagtgaaggatataggatacatctttaaagagaaatttgctaaagctgtgggacagggttgtgtcgaaattggatcacagcgatacaaacttggagttcgcttgtattaccgagtaatggaatccatgcttaaatcagaagaagaacgattatccattcaaaattttagcaaacttctgaatgacaacatttttcatatgtctttattggcgtgcgctcttgaggttgtaatggccacatatagcagaagtacatctcagaatcttgattctggaacagatttgtctttcccatggattctgaatgtgcttaatttaaaagcctttgatttttacaaagtgatcgaaagttttatcaaagcagaaggcaacttgacaagagaaatgataaaacatttagaacgatgtgaacatcgaatcatggaatcccttgcatggctctcagattcacctttatttgatcttattaaacaatcaaaggaccgagaaggaccaactgatcaccttgaatctgcttgtcctcttaatcttcctctccagaataatcacactgcagcagatatgtatctttctcctgtaagatctccaaagaaaaaaggttcaactacgcgtgtaaattctactgcaaatgcagagacacaagcaacctcagccttccagacccagaagccattgaaatctacctctctttcactgttttataaaaaagtgtatcggctagcctatctccggctaaatacactttgtgaacgccttctgtctgagcacccagaattagaacatatcatctggacccttttccagcacaccctgcagaatgagtatgaactcatgagagacaggcatttggaccaaattatgatgtgttccatgtatggcatatgcaaagtgaagaatatagaccttaaattcaaaatcattgtaacagcatacaaggatcttcctcatgctgttcaggagacattcaaacgtgttttgatcaaagaagaggagtatgattctattatagtattctataactcggtcttcatgcagagactgaaaacaaatattttgcagtatgcttccaccaggccccctaccttgtcaccaatacctcacattcctcgaagcccttacaagtttcctagttcacccttacggattcctggagggaacatctatatttcacccctgaagagtccatataaaatttcagaaggtctgccaacaccaacaaaaatgactccaagatcaagaatcttagtatcaattggtgaatcattcgggacttctgagaagttccagaaaataaatcagatggtatgtaacagcgaccgtgtgctcaaaagaagtgctgaaggaagcaaccctcctaaaccactgaaaaaactacgctttgatattgaaggatcagatgaagcagatggaagtaaacatctcccaggagagtccaaatttcagcagaaactggcagaaatgacttctactcgaacacgaatgcaaaagcagaaaatgaatgatagcatggatacctcaaacaaggaagagaaatgaggatctcaggaccttggtggacactgtgtacacctctggattcattgtctctcacagatgtgactgtataactttcccaggttctgtttatggccacatttaatatcttcagctctttttgtggatataaaatgtgcagatgcaattgtttgggtgattcctaagccacttgaaatgttagtcattgttatttatacaagattgaaaatcttgtgtaaatcctgccatttaaaaagttgtagcagattgtttcctcttccaaagtaaaattgctgtgctttatggatagtaagaatggccctagagtgggagtcctgataacccaggcctgtctgactactttgccttcttttgtagcatataggtgatgtttgctcttgtttttattaatttatatgtatatttttttaatttaacatgaacacccttagaaaatgtgtcctatctatcttccaaatgcaatttgattgactgcccattcaccaaaattatcctgaactcttctgcaaaaatggatattattagaaattagaaaaaaattactaattttacacattagattttattttactattggaatctgatatactgtgtgcttgttttataaaattttgcttttaattaaataaaagctggaagcaaagtataaccatatgatactatcatactactgaaacagatttcatacctcagaatgtaaaagaacttactgattattttcttcatccaacttatgtttttaaatgaggattattgatagtactcttggtttttataccattcagatcactgaatttataaagtacccatctagtacttgaaaaagtaaagtgttctgccagatcttaggtatagaggaccctaacacagtatatcccaagtgcactttctaatgtttctgggtcctgaagaattaagatacaaattaattttactccataaacagactgttaattataggagccttaatttttttttcatagagatttgtctaattgcatctcaaaattattctgccctccttaatttgggaaggtttgtgttttctctggaatggtacatgtcttccatgtatcttttgaactggcaattgtctatttatcttttatttttttaagtcagtatggtctaacactggcatgttcaaagccacattatttctagtccaaaattacaagtaatcaagggtcattatgggttaggcattaatgtttctatctgattttgtgcaaaagcttcaaattaaaacagctgcattagaaaaagaggcgcttctcccctcccctacacctaaaggtgtatttaaactatcttgtgtgattaacttatttagagatgctgtaacttaaaataggggatatttaaggtagcttcagctagcttttaggaaaatcactttgtctaactcagaattatttttaaaaagaaatctggtcttgttagaaaacaaaattttattttgtgctcatttaagtttcaaacttactattttgacagttattttgataacaatgacactattagtttttaggtcaagggcttactatttctgggtcttttgctactaagttcacattagaattagtgccagaattttaggaacttcagagatcgtgtattgagatttcttaaataatgcttcagatatt

SEQ ID NO: 1089 - protein, 926 aa, Homo sapiens
MPPKTPRKTAATAAAAAAEPPAPPPPPPPEEDPEQDSGPEDLPLVRLEFEETEEPDFTALCQKLKIPDHVRERAWLTWEKVSSVDGVLGGYIQKKKELWGICIFIAAVDLDEMSFTFTELQKNIEISVHKFFNLLKEIDTSTKVDNAMSRLLKKYDVLFALFSKLERTCELIYLTQPSSSISTEINSALVLKVSWITFLLAKGEVLQMEDDLVISFQLMLCVLDYFIKLSPPMLLKEPYKTAVIPINGSPRTPRRGQNRSARIAKQLENDTRIIEVLCKEHECNIDEVKNVYFKNFIPFMNSLGLVTSNGLPEVENLSKRYEEIYLKNKDLDARLFLDHDKTLQTDSIDSFETQRTPRKSNLDEEVNVIPPHTPVRTVMNTIQQLMMILNSASDQPSENLISYFNNCTVNPKESILKRVKDIGYIFKEKFAKAVGQGCVEIGSQRYKLGVRLYYRVMESMLKSEEERLSIQNFSKLLNDNIFHMSLLACALEVVMATYSRSTSQNLDSGTDLSFPWILNVLNLKAFDFYKVIESFIKAEGNLTREMIKHLERCEHRIMESLAWLSDSPLFDLIKQSKDREGPTDHLESACPLNLPLQNNHTAADMYLSPVRSPKKKGSTTRVNSTANAETQATSAFQTQKPLKSTSLSLFYKKVYRLAYLRLNTLCERLLSEHPELEHIIWTLFQHTLQNEYELMRDRHLDQIMMCSMYGICKVKNIDLKFKIIVTAYKDLPHAVQETFKRVLIKEEEYDSIIVFYNSVFMQRLKTNILQYASWPTLSPIPHIPRSPYKFPSSPLRIPGGNIYISPLKSPYKISEGLPTPTKMTPRSRILVSIGESFGTSEKFQKINQMVCNSDRVLKRSAEGSNPPKPLKKLRFDIEGSDEADGSKHLPGESKFQQKLAEMTSTRTRMQKQKMNDSMDTSNKEEK

SEQ ID NO: 1090 - DNA, 4789 bp, Homo sapiens
gcggttggacgcggcgctcagttgccgggcgggggagggcgcgtccggtttttctcaggggacgttgaaattatttttgtaacgggagtcgggagaggacggggcgtgccccgacgtgcgcgcgcgtcgtcctccccggcgctcctccacagctcgctggctcccgccgcggaaaggcgtcatgccgcccaaaaccccccgaaaaacggccgccaccgccgccgctgccgccgcggaacccccggcaccgccgccgccgccccctcctgaggaggacccagagcaggacagcggcccggaggacctgcctctcgtcaggcttgagtttgaagaaacagaagaacctgattttactgcattatgtcagaaattaaagataccagatcatgtcagagagagagcttggttaacttgggagaaagtttcatctgtggatggagtattgggaggttatattcaaaagaaaaaggaactgtggggaatctgtatctttattgcagcagttgacctagatgagatgtcgttcacttttactgagctacagaaaaacatagaaatcagtgtccataaattctttaacttactaaaagaaattgataccagtaccaaagttgataatgctatgtcaagactgttgaagaagtatgatgtattgtttgcactcttcagcaaattggaaaggacatgtgaacttatatatttgacacaacccagcagttcgatatctactgaaataaattctgcattggtgctaaaagtttcttggatcacatttttattagctaaaggggaagtattacaaatggaagatgatctggtgatttcatttcagttaatgctatgtgtccttgactattttattaaactctcacctcccatgttgctcaaagaaccatataaaacagctgttatacccattaatggttcacctcgaacacccaggcgaggtcagaacaggagtgcacggatagcaaaacaactagaaaatgatacaagaattattgaagttctctgtaaagaacatgaatgtaatatagatgaggtgaaaaatgtttatttcaaaaattttataccttttatgaattctcttggacttgtaacatctaatggacttccagaggttgaaaatctttctaaacgatacgaagaaatttatcttaaaaataaagatctagatgcaagattatttttggatcatgataaaactcttcagactgattctatagacagttttgaaacacagagaacaccacgaaaaagtaaccttgatgaagaggtgaatgtaattcctccacacactccagttaggactgttatgaacactatccaacaattaatgatgattttaaattcagcaagtgatcaaccttcagaaaatctgatttcctattttaacaactgcacagtgaatccaaaagaaagtatactgaaaagagtgaaggatataggatacatctttaaagagaaatttgctaaagctgtgggacagggttgtgtcgaaattggatcacagcgatacaaacttggagttcgcttgtattaccgagtaatggaatccatgcttaaatcagaagaagaacgattatccattcaaaattttagcaaacttctgaatgacaacatttttcatatgtctttattggcgtgcgctcttgaggttgtaatggccacatatagcagaagtacatctcagaatcttgattctggaacagatttgtctttcccatggattctgaatgtgcttaatttaaaagcctttgatttttacaaagtgatcgaaagttttatcaaagcagaaggcaacttgacaagagaaatgataaaacatttagaacgatgtgaacatcgaatcatggaatcccttgcatggctctcagattcacctttatttgatcttattaaacaatcaaaggaccgagaaggaccaactgatcaccttgaatctgcttgtcctcttaatcttcctctccagaataatcacactgcagcagatatgtatctttctcctgtaagatctccaaagaaaaaaggttcaactacgcgtgtaaattctactgcaaatgcagagacacaagcaacctcagccttccagacccagaagccattgaaatctacctctctttcactgttttataaaaaagtgtatcggctagcctatctccggctaaatacactttgtgaacgccttctgtctgagcacccagaattagaacatatcatctggacccttttccagcacaccctgcagaatgagtatgaactcatgagagacaggcatttggaccaaattatgatgtgttccatgtatggcatatgcaaagtgaagaatatagaccttaaattcaaaatcattgtaacagcatacaaggatcttcctcatgctgttcaggagacattcaaacgtgttttgatcaaagaagaggagtatgattctattatagtattctataactcggtcttcatgcagagactgaaaacaaatattttgcagtatgcttccaccaggccccctaccttgtcaccaatacctcacattcctcgaagcccttacaagtttcctagttcacccttacggattcctggagggaacatctatatttcacccctgaagagtccatataaaatttcagaaggtctgccaacaccaacaaaaatgactccaagatcaagaatcttagtatcaattggtgaatcattcgggacttctgagaagttccagaaaataaatcagatggtatgtaacagcgaccgtgtgctcaaaagaagtgctgaaggaagcaaccctcctaaaccactgaaaaaactacgctttgatattgaaggatcagatgaagcagatggaagtaaacatctcccaggagagtccaaatttcagcagaaactggcagaaatgacttctactcgaacacgaatgcaaaagcagaaaatgaatgatagcatggatacctcaaacaaggaagagaaatgaggatctcaggaccttggtggacactgtgtacacctctggattcattgtctctcacagatgtgactgtataactttcccaggttctgtttatggccacatttaatatcttcagctctttttgtggatataaaatgtgcagatgcaattgtttgggtgattcctaagccacttgaaatgttagtcattgttatttatacaagattgaaaatcttgtgtaaatcctgccatttaaaaagttgtagcagattgtttcctcttccaaagtaaaattgctgtgctttatggatagtaagaatggccctagagtgggagtcctgataacccaggcctgtctgactactttgccttcttttgtagcatataggtgatgtttgctcttgtttttattaatttatatgtatatttttttaatttaacatgaacacccttagaaaatgtgtcctatctatcttccaaatgcaatttgattgactgcccattcaccaaaattatcctgaactcttctgcaaaaatggatattattagaaattagaaaaaaattactaattttacacattagattttattttactattggaatctgatatactgtgtgcttgttttataaaattttgcttttaattaaataaaagctggaagcaaagtataaccatatgatactatcatactactgaaacagatttcatacctcagaatgtaaaagaacttactgattattttcttcatccaacttatgtttttaaatgaggattattgatagtactcttggtttttataccattcagatcactgaatttataaagtacccatctagtacttgaaaaagtaaagtgttctgccagatcttaggtatagaggaccctaacacagtatatcccaagtgcactttctaatgtttctgggtcctgaagaattaagatacaaattaattttactccataaacagactgttaattataggagccttaatttttttttcatagagatttgtctaattgcatctcaaaattattctgccctccttaatttgggaaggtttgtgttttctctggaatggtacatgtcttccatgtatcttttgaactggcaattgtctatttatcttttatttttttaagtcagtatggtctaacactggcatgttcaaagccacattatttctagtccaaaattacaagtaatcaagggtcattatgggttaggcattaatgtttctatctgattttgtgcaaaagcttcaaattaaaacagctgcattagaaaaagaggcgcttctcccctcccctacacctaaaggtgtatttaaactatcttgtgtgattaacttatttagagatgctgtaacttaaaataggggatatttaaggtagcttcagctagcttttaggaaaatcactttgtctaactcagaattatttttaaaaagaaatctggtcttgttagaaaacaaaattttattttgtgctcatttaagtttcaaacttactattttgacagttattttgataacaatgacactagaaaacttgactccatttcatcattgtttctgcatgaatatcatacaaatcagttagtttttaggtcaagggcttactatttctgggtcttttgctactaagttcacattagaattagtgccagaattttaggaacttcagagatcgtgtattgagatttcttaaataatgcttcagatattattgctttattgcttttttgtattggttaaaactgtacatttaaaattgctatgttactattttctacaattaatagtttgtctattttaaaataaattagttgttaagagtcttaatg

SEQ ID NO: 1091 - protein, 926 aa, Homo sapiens; identical to SEQ ID NO: 1089

SEQ ID NO: 1092 - DNA, 41770 bp, Mus musculus
  misc_feature (1)...(41770): n = A, C, G or T/U
atagacaaacttagatgaagtcaacttctgctcttctctcggctcctgacagcgagagtctttcttgtgcatcctctcttccccctagaacatgtgagttgcctgtataaaggcactggccaccaagcctgatgacaccaagcctgatgacaccaagcctgatgacctgaggtcagttctgggacccacatgatggagggagagagactccctcatgttaccctctggcatcccagcactgctcgtgcaggctcgtgtctccatgtgtgcctacacacactaaacaaatgcaagaagacgtaaagagtggatgggaatctcagatctctgagttccacccttgtttgcttcatggcagagaatctgcatgtcttagtcaaggtttccattcctgcacaaaacatcatgaccaagaagcaagcaagtaggggaggaaagggtttattcagcttacacttccatgttgttgttcatcaccaaaggaagtcaggactggaactcaagcaggtcaggaagcaggagttgatgcagaggccatggagggatgttacttactggcttgctcccctgatttgcttagctttttctcttatagaacccaagactaccagcccagggccggcaccccccacactgggccctcccacccttgatcaataattgagaaaatgccttacagatctcatggaggcatttcttcaagggaagctcctttctctgtgatgattgcagcttgtgtcaagttgacacacagaaccagccagtccacagcatataggaatgaatgtgtcttttctctctccgtgcctgatgctttgatgcctttgcttacgtgacataaacattttctgtgtgcaggtgtccgccttctctacttactgccccgacttcagtcctcagggctgcgatgcctcttgtggttggctgtagggcctacattgttctttccacaacctagagcaccccagctaggttatcgttaaacttctcttgaggggatgtgtccacatcccacaaactgccttgaccctctgggaccttctaaatccagcctgctcagacactagtctgtttattcccttgatttgtgggtgagtgattgttatatattcacagtccctaatgggtttggaaatacaaatataaagaagaaaaaaatgtctgtgttgcattaaagaggaatttggggagaattttgacaatagatttattcactttaatgaggaaataagtggaggattgggaattgtttgaaattgtgaggggactgagaagtatgtggcggtaagtgaacatcaggaagtagattctgggcatcacagcaacacaggctatcacagtgacacaggctatctcagtgacacaggctatcatcacagtgacacaggttatgcaaactcagccccttggagttgtgctttggttctgtggtgcctgtggaaggtgaagccatggtgttaaaatgtaaggaaaggattttttttgatggtccttcctattttgacatggaaagctggataaaatattcttaactctgggtcatcatattttcatctgtgtatgttaatccagtccacatttttctgtatgtagttatagatgctctttatctccatagaaaccagccaccatgggaattctgaaagagaagttgagttctggcttttcaagatatttagagggctgtctgtgcccaagcctttctcctaccagagtttgaacaggagagatgaatctaatttaaatctccttcacaattattttatttaaaaaataaattaaaggccattattaggaacattgtttcttttttgttcatttttctttttttttaaagatttatgtgccgggggtggtggcacacgcctttaatcccagcacttgggaggcagaggcaggcgaatttctgaggccagcctggtctacagagtgagttccaggacagccaggactacacagagaaaccctgtctcgcaaaaacaaaacaaaacaaaacaaaaaaaaaagatttatgtatttattttatgtatatgagtgagccatcatgtggttgctgggaattgaactcaggacctctgctcactctggcccagttgctccagcccaaagatttatttatttatttatttatttatttatttatttatttatttattattatatgtaagtacactgtagctgtcttcagacataccagaagagggtgtcagatcccgttacggatggttgtgagccaccatgtggttgctggcatttgaactcacgacctttgaaagagcagtcagtgctcttacccactgcgccacctggccagcccaggaacattgtttcatcattgaaattttggaataattgagtctttggaaatatctaggttaaaatgtatggggttatttattctttggggggaggtttcagggggttatttattcaaatgatattcagcatacaatctccacttattaatagctcaactaacacacacacacacacacacacacacacacacacacatgttgcagaagaaaagcactaaacccatcaacctgcaggaccacctgttttatagtaaatgaatagatgtattcctaggaatggtagaagccatgccacgccagcaattaggaagacaatatgtgaacccaggtagtttaactccagttcccaaaccttcataagttcctctccaaaagactgtttggatctttcaccatttcatggtaagtgttgaaagatccatttgccaaagtctaactcttctttatgctctgctcagcctggcctggtggatctcatcacatgatgccccttggaatgctctccttttctttttccttagtttactttcctctcctctcccgttgcctttcccatctgttgcggacctcactcaacagcaatgggatggatgggatgagattctgcctccaggctcacagccactgaggcatgccgggcttcctgactcttcatcagaggagaagcccaagcccaccgtgggaactcacttagattcaggcccagctttctgcacccttcccttcttggctcattcctatccccactcatttgtctccaaattttatgctgtttatgttttattgtttgtcccttcaggctctttgtttataaactgttcccgttcccatagtaccccaatccccacccccaccccaaaaatagaaagaaaagaaaagaaaagaaaagaaaagaaggaagaaaagcactttgtgcagcatctgcacaaagccagcattacttcctaggattgttcggttcggtccggtttggtttgaacctgttcccctgtttgctgttttattaatcccaggttcatgtacttcggtgttatcttcagacatcagcatgtaaatgtttccttgacaacattttgctcctctactcgagttttatagctctgtattttgatgacctggattaaatacacatacaaaagtctatccccagaggctatttctatataaggcatttaaaaatacatgtatttttacaagggattaaggccagtgattttctcacagcctcaaaataacatttggaatcagtcttttgagtgtttatattttcctaagagcccaaataaatgccatttatactaaaataaggctattctctataaagtgttcatcattgcctcattccctgacattaatatggcaagagtgaggcagtgcagctggttctctgtataaatgactctaaactgggctatttacttaagctccatcaacaaacttgctactgttacaggccacacacttaaacctctcttcatgtgcacacatattataaatatgcaaccaagaatcacaatgtttacacaatcacaaatgtaatgccaaaaagaagtacagccaggcgatggtggcacacacctttagtctcagaactctggaagcagaggcaggcaaatctctgagttcaaggccagcctggtctacagagtgagttctaggacaaccagggctacatagagaaatcctgtctcgaaaaaaaaaaaaacaaataaataaataaacaaaataaagaagtaatatcaaatagcaacataagtgatgtcgttgatggcagaggcgattgacgtccacaataagtcatcaagggagaaccaatcactccagagctggggacagctgtggaaggtgcgtcagagacctgcctctgaccacgtagtggctctctagataggtgagaaatgtcaaaccgctaaactgagagtaacaaatcttttccattctttaaaaactgaggtcttactgtgtagctttggctgggctagaactcactatgtagatggaagaccacactggccttgatgtcacctcccacgtgctgagatgaaaggtgtgtaccaccacacctggcgggagtattagctcctcgaggtagtgtttcctgagccaaacaagtgtgttctgggttatgagtgtagatctaggagatctagagactggcttatgtggagaaattctcttgctttgattattttgtgactctacatacaacagttttaactttggctttagatgacatctctactgcacctagctagagacactgaaatgcttctttctcattgttttttgggtcattaatcagtgcactgcttctatattaggtctgccttggggttcacacacacacacacacacacacacacacacacacacacacacacagagagagagagagagagagagagagacctgaaaagtgggaagaggttaagtttcataacttagttttcaattttctgtttcttaatctagactctgctatcctccagggtttgggcagactagctgcataaaagtaaaatccccccccccacttttcttaattagcacaaatgcccaaagctgtagatactgaagtagggagcaagtgcccacttctgagaactgttatgccccaactcatgggcttgtaccaaggctgatctggtccctgttgattgggtcttgctggttacctgactcaagctcagatggccaggttctctctgctaagaattggaaatgtattccaggaactggctggcaagactgtactagggagctctggtagctgtgtgtaaagagaagcagagtgagctgactgaagaccaagagctagagctagagacagagacagagagatagacagagaggcagccacagggggtgttagaaagactgcagaaaactgaccagaactttaggttttctagcccctgggtctttccttccagaggcctggttattccccttttctggacatgccaagaataattccaaattcttgaacataaactccttcactaaacactaaagcttgctggagatggtttctcccaataagtaattccatcaagactccctcttagaaagcataatgtgctcattatcattgcattgaggagcagtgtggcctctttagacatgtgattcctgtagaactttctaggtccctgggcagtctccacagttcccaaggaactacttcaccgattagttgtttgcaggccctgctggcctccagcagctacttcttgtacctgtgttgctctcacaattacttttgagagtttaaaagagaaaaatcagggttggttgacagataatacaaacaaggagacacagagcagggttcatttcatttcatttcatttcatttcatttcatttcatttcatttgtagctgtcttcagacataccagaagagggcatcacatctcattacagatagttgtgagccaccgcgtggttgctggaatttaactcaagagtagtcagtgagctgggcagtggtggtgcacgcctttaatcccagcactcgggaggcaaaggcaggcggatttctgagttcgaggccannnnnnnnnnnnnnnnnnnnnnnnnnnnnnnnnnnnnnnnnnnnnnnnnnnnnnnnnnnnnnnnnnnnnnnnnnnnnnnnnnnnnnnnnnnnnnnnnnnnnnnnnnnnnnnnnnnnnnnnnnnnnnnnnnnnnnnnnnnnnnnnnnnnnnnnnnnnnnnnnnnnnnnnnnnnnnnnnnnnnnnnnnnnnnnnnnnnnnnnnnnnnnnnnnnnnnnnnnnnnnnnnnnnnnnnnnnnnnnnnnnnnnnnnnnnnnnnnnnnnnnnnnnnnnnnnnnnnnnnnnnnnnnnnnnnnnnnnnnnnnnnnnnnnnnnnnnnnnnnnnnnnnnnnnnnnnnnnnnnnnnnnnnnnnnnnnnnnnnnnnnnnnnnnnnnnnnnnnnnnnnnnnnnnnnnnnnnnnnnnnnnnnnnnnnnnnnnnnnnnnnnnnnnnnnnnnnnnnnnnnnnnnnnnnnnnnnnnnnnnnnnnnnnnnnnnnnnnnnnnnnnnnnnnnnnnnnnnnnnnnnnnnnnnnnnnnnnnnnnnnnnnnnnnnnnntctctctctttccttttagttgttgttgttgatttttgagatagggtttctctctgtagtcctgcctgtcctggaacttgctctgtagaccaggctggcctcagactcatagagatctgcttcctgaaggctgagactaaaggtatgtgctaccggccgggcggtggtggtgcacgcgtttaatcccagcgcttgggaggcagaagcaagcagatttctgagtttgagcccagcctggtctacaaagtgagttccaggacagccaaggctatacagagaaaccctgtcttgaaaaagaaaaaaaaaaaaaaaaagtatgtactaccatgaccaacaacagagtagattttttttctaattttatgtatatgagtacactgtagctgtacagatggttgtgagccttcatgtgcttgttgggaattgaatttttaggacctctgctcactccagtcggtccctgcttgctcaggcccaaagatttatttattattatacataagtacactgtagtctgtcttcagacacacacgaagagggcatcatatctcattacaggtggttatgagccactatgcggttgctgggatatgaactcaggaccttcagaagagcagtcagtgctcttacctgctaagccatctcttcagccccagagtagagttttaaagacatgagaaatataaaaaataagatgggtgactttgacaacagagtggtaatacacataacagcctgttccaagcatttgttaagaaaaacagtcatgggcaccattaaacaaataggagaataaccttggcctagtgtgttataaaccataaaactatgaagtttctatcactatctatataagtatctcatagtataaaattagatgtcattgtatctgagagatttctgatttcgtgtggcttcgttttactatattgtgaactcttatatgaatgtatgatatttattagatgaagtaagaaaaatttagagttggagtaggaagatttgggaagaacaaataccctgatcctgaatcttctaccctcgtttgtcttagatggttggttctgacacaccagcctagagattttgggatgccttcactggggtttccattctgtaagagggtatcatactagctttcctcagatccgtgttacttggattttccccatcactgtgacatatacccaagagaaacgacttaaaagaggacagaattatcttggctcacagtttcagaccacagtcggctggatttctgtggacctagggcagaagcaatttgcttcaaagcagagagaaagctgggaaatgggacaactgtgctaacagacttctttctcctaccttttcaaattccatgtagaccaacatctcattggatggtgctgtccttgttcggggtgggtctttttttttttttttccataatacattgcctctggaaacacacacacatgcacacgcacatgcacacccagaagtgtgtcttacttatcttctaggcatctcattccccagtcaagctgccagttaagatttgtcaggacatctgggtagcactttcccattgcttgtaaatgctgaaccatgtttgttcccaaatataagtagataacttgttaaccagaaaagaatcacattattttgccagttttcacaggtacacttccagataacaagtatggaaataaaatacaacatggtaggttcaaagatggaggaatgtgattttagagtcaattgaacatgacttgatacattgtagttaggagagactctccttcagtgtggtagtttgagtagcagacctgttgttgtcgctgttaggtagaatgattgaaactaaactcagcctcagccatgacctatgctgaaagaacaagaggcacatttgtttgtttattgaaacaaggaatacataggcctggaatttgctatgtagactaggctgttttcaaaaatcacagagattctatacatttttttcttggcctaatgcagaaaaattcaaaggaagacttcatatagtaagaatgttggaggcttggtgaaaaacacacacacacacacacacacacacacacacacacggcacttgggaagaagcagaacaatcaggaattcaaggtcctccttagctacaatagtgaattgaaggctagcctaggctggctgtatggaactctttcagaaagaaaagaggatggatttcgttgcatgtaatttgctcatttacctccttattaggtcttctagcagatctagatgatgtgaggtttacaatgtaacgtcagtgaaaggaccccagcctccttgggaagtgcgtcaggggccaacctctggaggtcagtgatggtagacaatcctccactattcgggatgaacatctttatcctctgcggaagctgagacgccctactttccgtaggcaatggaaatagagtaactatgtaggaaccaaggataggatgccaacggaatgaattaatccagacaccttgggcaggggaaattgatgatgggttcctgggacagacacacaaacagaaaatacctgaggaggaaaaggtttacttggcttaacaccttctggtagacaaggtaggaattgaagcagaaatcatgcaacaacgctgcttagcggttccagcgtcgatgaaacaaacactgagtgaataagagagggggtgttggaattgagatggtgaacagttttgagatgctcaaacattaaaccatctcattttgaggcagctggggccgaaaagaatcagttgtgttttacccaaagatacacacagttgcactgcaagcatggacggagcaccgggctttcagcgtcgtttccactacacctgtgtgcgggtagaaaagtcttaaaatatcataaggataatttgacgtttctttcgtggtacaaagaatcaaacacagggcgtcggcggtttgcacggtaagaaagtggggctcttccactgggattcaaggtggaggagctactatttgtcattggctccaaagtcgctgttggtgctgggcttcctgagcgatagggacattgggcatgtcctcttcaccacgactcataagcacaagaggtgatgacactgcttggagcggtctgtaaggaggaggtaaggcagtgaagcacggggctctggatccagaaagacaaattcccacattcactctggggtgacgtcacccggagacttcagggcggcgcgccagagcgacacccccgcgctcaagtcccgcccctcagcgtctccacgtaagacgtgtgtcaccctgagctagtggtcccggaagtaaaaccaggaggggcggaagagacggcggaagggcgggcctacggcgcggcggcagggggcggggccgagatggtaacggacgcgcccaggagccgcgctgcagagagggccatcgtgcgaccgctgccgcaggcgcttgctccgagtaaccctgcggctccgcttctgccatgatgatccacggctttcagagcagccaccaggacttctccttcgggccttggaagctgacggcgtccaagacccacatcatgaagtctgcggatgtggaaaagtgaggctgtggggcggggccgggccgagccgagccgagccgagccgagccgggccaggtccggttggtgtccgggctgggggtctgacggtctcggtgcagcctcacgcggtacttggggccgcaggctcggtccctctgaccgaccgttgattgacaacttcagtaaatggtcctgttccctgctcgcggcgacctctgcttgctggaactgtagcttctcagggttgaactgagcgcggctgttttggtggacttcacctaaacctcgccgctcctttttttcctacctaagcctgcgcaacctttctgggcgcgatgacctgttcccttgcgggcaatgacggaaatggtatttatgtttagttttgagcttctttggttctgtggtgtgctcttgaggttctgaacatgaaccattgagtaccacagacttcagaggacgtgagaccgtgtgacgttactgtgtgactgtttaggatgaagatttcaggtttttttttttttttctttccttcttttagcaaatcaggtgctgtgataagcacttgagataggacagatgaaagagaaaggcccaaggaattcatagtttcacgagagaccgttatattattgtgtggttggttaggatgaagatgtatacaggtgtgtgtgcgcgttagtgtgttcgcgcgagggtcagtgcacctgggcagaatcttgatcaagtctggagactggatggccgggtaaagccagcactcagactgagatctgaggtgtttggggatgcctaaactgtatcctgacaaagtttgggggggggggcgccctggcagagtgttgcctccctcgtcattggagagttctctgtcttgctaagaagtttgaattttatatagtagccatcaggtgtagttttactcaatatctacatgcatcgtggttgtgtctggaaggtttcttggaggtgttgtagaagatggagggctggaatgctggagaggaggccagtaagcaggaaagagatgacagaagctgagattcagtgcttaagtttggtaggcagttgatggaaagaaagaaaaagggaggctcttcaggaccttttgttgttgttgttgttgtttaaaatttacatatgtaaaagaatcctttttgaaacataagttgtttcaaatgttattaattcagaatatgtttctaatagaattgtttttgttgtatgagtgttttgctgcattgcatgtgggcctggttagggggtgtcgtgggagagggggctggatcctctaaatcttaaacaaggcccaaacacctcatttctaatgttatgttttgcctttagcaaatagatactaccagtgatagagctgaaagacagagcatttgaagcagcctaccataacggagctgcttttcatgtagctgcactattgtgcatgactactaaatttcacaaaacctgttaaaagccctggagctacctttattatttcatatttgctctaattcaggaaagtagttaaaacctgtattttacagactcatcttgtggatctcaatctatcattgtacttaatctcttagtcatttaatgttttctatcccttaaaggttaagaataaattttacctaaacttatggtgaaaatgccatttcattgtttttttttttttgttttttttgtttttttttttttgtttttttgtcgttgttttttgagacagggtttctctgtatagccctggctgtcctagaactcactctgtagaccaggctggccttgaactcagaaatctgcctgcctctgcctcccaagtgctgggattaaaggcgtgtaccactcgccgggccatttcattgttcttaaccatcttaaaaatatgcagtttagaaacctcagataacaacaggtaaaatagagtatgcacccagtttttgtcttaatatacatcttaaatattttcccatctttcctctaaataatttaatggttttataatatttcatcatatggttacaaatttgtataaccatctattcttgtttgtttgtttgtgacaagacctctacatagccctggctgtcctggaactatgtagatcaagctgccatcagctcacagagatctgcctgcctttgcctcctgagtgctgggactaaagatatgagccaccataccaggcttagttattggtaattgagacagagtctttctacatagtcctggtgccctggaactcactatgtgtaggtaggctgcccttgaacttgacctgcctgccccccccccaccccccaagtggtaggattaagggcttgtgtccccttgcctggccgtataaccatttattttgtcctttatgaaaataaacagccgggctgtgatggctcacgtctttaatcccagcactctggaggtagaggcaggtagatgatctgtgagttggaggagagccagggctacagggaggaaaaaaaacagcatacggcccttttcactattataacagaagttataaccattagtatatataatccaacctctctgtatttggggttattttgtatagattagtacagtttataatttgagtcagaaagtataaatccgattaaattctttgaatgtttttgcttgattgtagctccaaggagaaagtcgatgtcctagaacatgagtgagtgagccagtgtgattagggccccaggggggaatgtaggtgacctagagagcctagtgagctggtgctgtggcctcaggggggaagctgagtctccttgagagccctgtcagcaagtgttagcttctatcctctttcttcaatgggattgtttctttttcaccagctttgaaatttctaagaagttgacagttgacatttctaccagaagagttggtttttgtccttacaagcaacaggctcttcattatctttccttcagagctattgttgatgcagtcgtgtaaaagcacagagttcagcagatgtgggagcgtagtgcattaagtcacctcctaggcgatattcaaacttttatttttaaactgtcaggggtctttgatgactcataaatgagagaaatattctccataaagacctgtatttctttcctcttaaacctaacttgttttatttaatcatataggtttttaaaaaattattgattttaatatatgcacaaagaccagtttggtgagtctactaggaaataattttaaagctattggaaagactataatcatgcatagatctttttttgactttatgtaaaactgtaacctttaaaagttttattagcatatattgatatgtaatgggtttcatgatgacattttcctatgtgattcctggcaatctccttgttcctacctagtccccttctattttcttgtaagaatatgctttttctttttccttttctttttctttttctttttctttttctttttctttttctttttctttttcttttctctttctctttctctttttctttctctttctctttctcttctctttctctttctctttctctctttttctctttctctttctctttttctctttctttctctctcttttctttttctttttctttttctttttctttttctttttctttttctttttctttttctgagacagggtgtcagtgtgtagaccaggctggccttgaactcacagaactgagcttaaaggcatgtgtcatcactccttgcaagaatacagtctctttggtattattttaccctacctcataattgtaactatttagttcaagaatctagaagttttaacaaggaaaaaggaaaagaaagccttgtgtgctgtcatagagcacttacatagagctcttgtgctttatttagcatcccttagaattttactcagagccaatttaaattgtactttatgattataaccacacgagagtgagacggaagggcatcattgtatgtatgccctttgccctaacagttgaattgttattttcatctttgtttattattatacagtattaagtgtatttgtttgtttttctagcctgtagtagattagaaaccagttgagaaggatatggataactcagggatagagccgtcattctggagctactgaaggtttacacactcagtttaacttggcgcagcccatatgttcttacatgtgaagattgctgccaagaaatggcaaaataagatttaagttttctgcttaaggacacagaaaagttaacaatttaaattagataattttaaagcagccttgtcagaaccttatctatatatctgcacttatgttaatgttacagtttatctgcagaattcccaaaaggaaaaaatttatctttgccaacaatctccctacccagatggagacactggtcaaatcctggtgtattttaactagcaactcagatacttaaatatacactttaagagccttttataaggccagccagatagcctgcctccttccctccctccttccttccctcattccctcattcttctgatttttgatttttcaatgtagccctagctgtcctggaacttgctttataaaccaggctggtctctaatttatagagatctgcctcctgagtgctgggactaaaggtgtgtactgccaccaccactatccgagctcattcctatcttcataaaataaaaaaacttcctaagttagagtgacaagaagttgatagttcctagattagtaagtggctagctaagacttggctcttggaatcctcatcgcaccgttagaaggtgttgattcagggaagcctgtcagagtagaagacttaggacctggcagcctaggtgaatgaacaactttggtgatttatctttttggttgtgagccatctctctcgtcctagctcttgtaatctagacaaccgatatatacgtgctttctttatctttatctcatttcttctatgtatgctcaatcttttgtgttataggttcaacaggagccagaaaagttagttatattatgagcaaaatgttacatatgtcattgtaaaatctggtgtaaaaatagtggtcaatggccgggcagtggcggcgcacgcctaaaaccccagcacttgggaggcagaggcaggcggatttctgagttcgaggccagcctggtctacagaatgagttccaggacagccagggctatatagagaaaccctgtctcgaaaaacaaaacaaaaaacaaaaaaaacaaaacaaaaaaagtggtcaatgaatagtttcatatttcttttttaaaaacccccacaaagaagtctatagaacatttttaaaagtttctaaaatcagtaagacttggtttataagatgtctggaaaatgcacttgcttggaaccttagtgttatactttctgatcgtgagatactaagacttgcaggttttgttttgttttgttttgtttttaaattttagtcaagatctcactgtgtagtcctggttgacccagaactcactgtgtagaccaggctggcttcaaagtcacagagatctgcctgcccctgcctcttgaatgctgggattaaaggtgtgcaccactgtgtccagattcagaatatttttgttgctgcttgcttttttttaaaaaaagatttgtgtattgtatgtatatgagcacgttgtagctgtactgattgttgtgagctatcatgtggttactgggaatttgaattcagaacctctgcttgatctggttggccccactcgctttggcctaaagatttatttgttattttatctaagtacactgttgctgtcttcagatcaccagcagagggcatcagatctcatggttggttttgagccagcatgtggttgctgggatttgaactcagaaccttcggaagagcagtcagggctcttaactgctgagccatctctccagccctgttgcttgctttttgttcttgttttgataaaaggtctcgctatgtagatctggttggtatagaacttgctatggagtgcaggctggcttcattaacagatcctcttctgcctcctgagtgctagaactaaaggtgtccaccaaccaccacacctaagtgagacctgttgtctttataaatatgtttcttctatatgtacatttactatgtattttctaatgccagctattcgtaagtgataaataaaaaacagcaaggtagctgggcatggtggtgcaggcctttaatctcagcacttgagaggcagatgcaggtatatctctgagttggaggccagcttggtgttttgaggtggaggggtttaggacagtaacacagagacaccctgtctcaaaaagcaacagcaaaataaacaaaagactcccctcctcaaaacaaaaataaagcaaggtagttgggaggagacattattttaggtaggatactatgagatcacctctaaaacagtggaatgcacacacaacacacatctactctactgctttccaaccctagttcctttatttgtctttgccttgcccccttcatgcccctctttgtcctgttacttagcagcttcacacttctgctcagccttgtgacttccgtttcatgctatgtctgtctgtctctttaaagatttatttatttactatgttacagtgtctacttacatgtattcctacacactagaagagggcagcagatctcatagatggttgtgagccaccatgtggttgctgggaattgaactcagggcctctggaagagcagctagtgctcttaaccactgagccatctctccagcccccatgctgtgtcttgaactgtgcttcttgtgaccgttcactcagagttcggaaaggagagaatcgccgtactaactggtcggttcaacccagaataagcatattggaccaagtttccagagtttgcctttggttaagttttgaactttcatccctgagttggaagttcaggttgtaaccaggctcgttaggcgtgccagcatgtacttagagcttggttttccaggagtgaataagtaactgcccctagctttacacaaaatagggttgctgctaagtgatagcgaatgtgtctagcaggtgcaaggctctccgttcaaactcaggtactgaaaaccagaatgagaagtcctttctttaactgggactataaaccggctttaaaaaaaaaaaaagaaacatcttttatttgttgacattaactataattgcattgttttttctcttccctttggccagccctcccatgtaaccttccacttgctctctcagattcatggtctctttttctttaattattgtggttggtggtgatggtgtgcatattgcatgcatattatatgtattattctggcttagttgtaggttctctaagattcatgacctcactagtcccaggtacttggtgaagtttctagtactgagcataactttcttttgttgagtgggccttaaggccaattagagagctgttggttaccaccaagatatatgtgccactgtccttacacttaactcttccatgttggttgtagtccagagttgtcaacccagttttcaaaaggaccagtgaactggacagcccaccccctacttagaggttgacagcttataacttagtgccaatcagttggtactatgtgacaaagcaggctttgtgttggttggccaacttttttcattttctttttaaaccagaagtcccaatgtaaacaaaaacaatctcattttttcttaacaaacttttcaagtatcaaaacaacaataacaataccattcacaatatcataacccagcggtgtgttattgatttgtggctctggctttttgtagatattctagtgaagctgcccatctgagacatgttaaaaatggtctaacatgttgaataaaggcctggtgttacacctagcagtcacgtgctcttgaactctctgggctttttcttagcacacagaatggtttttaaggatcagatttttacaagtagtgaagttggaattggccttaattatgatcactaccaggttcttcactttggttttcccccatgtatccctccctccccactctgtcttgctgagtttagtgctgcagagatttgatgatgaacaagtaggtgatgagagcatcttacagattctttatcgtcatggacttctccacttatcctggaaagtcagagttaggttgggatgagaaagagacagaattgactcgtgagcataaaggaacctccctgacctctgcttctgtgcaggttagctgacgagctgcacatgccatccctccctgaaatgatgtttggagacaacgttctaaggatccagcatggctctggctttggaatagagttcaatgctacggacgcactgagatgtgtgaacaactatcagggcatgctcaaagtagcttgtgctgaagagtggcaggaaagtaggtgagaatctgggcagttacaggctcaacacaaagtattcaacaaggatatgtgtgttttattacaattaaactttcaaactgtattattcaaaactcatttttctgagccataaaacaaaggttaattttaccactgcttgaaatactcattaggttaaaatatatgtgagctgagctttgtaggtgttctttagtccaatcattacagaaactttaaagtttctggttttaaagaaaaacatttcttgtaattgaatatttgtggggtattaaaactaagaaaaatgtttggttggttggtttttgctggttaaattagcaatatttactttgtgcctattgaatatatactatatgctttgaaggacagaatgaaatgtgagctttgaatcatgtctcaggaaatgtaggacgacctagaaagagtatatcagcacatgacaagttaaataacaatacatgttcagaaaacatgtattgttacttagaaaggttggttttatgctagtgaatgatagtatatgcctttagtaggatgttttatattgtatgtgtgttagtagggtattttattttatatatataatgtgttaatttggtgtacatatgaacactgatatatattctaaattttatcgtcctttttgttttggtatttgaggacggagggcgaacactccaaagaagttattaaaccatatgactggacctatacaacagattataaaggaacgctgcttggagaatctcttaagttaaaggtaaatctgaacctttgcttcatatgattcatataatcattaatcttgggagataatcttagcactacatcctagttgtggttattattttcccaactcctttcatcctgcttcttgcttgtggcagactttagagcttaatgtgagaggttttggtgtattatcatattattataaatattagttaattaattagtggaaaagaagactattacaagattttccttttttctctttttgagatggagtcttgcaaggctggtattgaacttttgggctcctcttgccttggtctcctcagtgtctagaaccacaggcatgcatgttctgcctgagagcagtagtctttctttcttttttaaattcaattatttaattaattttttaaacaatattctttaaagtaaggttggtagatgcttgctttgccatggtgttaacaatatgacagccaagaagcgtctgtccccagaaacgtattattaggtgagttagatagaaactgctagctagaagctagttttacatatgaacaaacagttgaacagaaaacttatatatgcttgcactgattttaaatttggtatgactttagatagttagttacctctctctttctttctttctctctctctctctctctctctctctctctttctttctttctttctttctttcttgttttttttgtattttaatttttgagacagggtctcgtgtagccttggatggcctactctatttagaccaggctggccttgacatttgcctgcctctgcctccctggtgctgtgatctaaggcatgtgccaccacacctggctctttaggtgaggtatttaatcaaggctagtgaccattgctggcaggttgagtaaatgataatgcttacccacagcggagttttatatgaagagttcacaagcagattctaattattacctgttcaagtgttgttagtgttgagttgcatctgtataatctctgctccagaaaagcttccccgagagtgtggaaccgctgtctctacagcagctacatttttaggtcttctagtaggactgaggtgaaacaaatgtggcttaggttgtgtgtctgacaagattgttccattttaaagcattttccttaaaagttatttagggctgatgagataactcggtgagtaaaggcatggctgccagtgacctttgcttggtggccagagagaacctgcaccttcaagttgtcctcagatctccacacacatacagattacacacagattaaaacagtttttcccccaagacaggatttctcagtgtaatcctggctgtcctggaacttgctcatagaccaagcgccacctgtctctgcctcctgagtgctaagagtaaagacgggccgccaccacccagcagatgaaattttttaaagtaaaagttttggcagctagagttaactgggcatgtgaggtggtgtgtgaaagccttgcctttgcacaatgttttagtctcagcagatagaagctaattcttaatagtttttccctctccaacttttctgtgtgtttccaggacagaaacacaatttttgagaaaatcaatgttcactcatttattcacttactcatttcatcagacatacgatgaaactttgctgtgtagaagccattggtgattctagaagccattggtatcctcctgtgtgaggtgagggaattttcttattcgctaaagaactgcagattatagtctcttctgatagaagaacatcgcagcgagcctaggtcattgatgttttgttgccaggaatgagggaaatagattttttaaaaacctcatgcaatcgtgatgattactctatggattcacatagggaaagctgcattagctgtaggtcgatcaggaataggaacctataacgcaagtcttctcaggtgttgctcaaaatgtcagagtgatcacctagtaatgtgctcaggctttgtccaaatataaactttgtttcaaatcagcaggcaaaagctttgccaggttggcaaagcagtttgtacatgccccgcccccccctcgtgtgtgtgtgtgtgtgtgtgtgtgtgtgtgtgtgtgtgtgtgtgtgtgtgtgtgcgtgtgtgtgtgtgtgttcttgtcgtttgttgatttgttgatgtgcatactaggctctgtgtctagcaagcttctggggcttctcttgactccagcccttggagcccagggttacagacatgcacacactgttgggtctggctgtatgtgggttttgggctttcatttttaggctttgtcctttgagtcatctctccacagattgatcttgcaaggtcttttgataaatggacagtaccagatcctatgtgtaaaagtatttaccggtctatctgttacacaaggaagacctcaacaaatgctctcaaatactagtcactgtgtttattgaaataccagaaataaaagaagctgtttcattacctaaaactgacgcacgcacgcacgcacgcacgtggggggtttaaatgtctttgtttgtttgtttgtttgttttgttttagatggaatgactgagactggagaggtggctcagcagttaagagtacttactgttcttgtagaggacccaggttcatttctcagcacccacgtggtggctcacaaccatctaattctagttccaagggatctgatgttctcttctgacatgtgtaggcccaggaatgcatatggtggtcatatatacatgtaggccaaacactcatacgtataaaataaataaatctaatatatatagatagatatagatatctatatctatatctatctatctatctatctatatatatatatatatatatatatataaaatcttttttaaatggaaaattttccaggcaaaaaattagaattttgttctttagtgttcaaaatatctctgtaggtaggtactggtgtccttagtttgtagatggtttggggtagcacactacccttaattatggttttgaatatttgttatatgtagatgacttcataggaatttatgagggttttttgttggtttttattatttttaggttcttctaagagttattaatttattatatatataatataatataaatatatatgtgagtgctctatcggcattacacctgcatgccagaagagggtgtcagatccattacagatggttgtgagccacaatgtggttgcttggagttgaacttagaacctctggaagagcagccagtgctcttaaccactgagctatctctccagcgctttttgtttttgtttgttttgttttgttttaagacagtgtttctctgtgtacccctggctgtcctagatctcactttgcagcccacactggtctcaaattcacaaagatccactgcctctgcctcctaagtgctgagattaaaagtgttcatcactaccaccaccacccagcctttgttgttatttttaacatctgtacatataatatcagttgagattttaaattctgaactcttcctcataacattcttcaacggctggagagatggatcagtggttacgatcacttgttctcacggaggaccagctttggcttctagcaggtacatggcagctcaccaccgtctataactttatttcctagtggttatttgtcctcttctggcctccaaggccagcacatacacatggtatatttacatacacgcaggcaaaacatgcctacacataaaagaaatctttagaacatgcttcaaaaactgtgtatgtataggaggtatatgttagtaaaatatattttcttagagtcaaagtgttgggactggagagggactcctgtctcttgctttctgagccttgctttttagttctggaagtagcttgtgtgtatgtgggtgtgtattttattgttgtctcctttttggttgtttaacttttactctttggtttgtagaatggcataagaaaagccactcacaaagttgtggaaatcttagcctgactagattcatgtctacctttgtgtttattagctggcctaaggtgatggtgtgagaatatgattagtgaagtaaattaattcctaatactgtgcctgtcccatagtgatgtaactatatatggctatttcttcttgtttaaataaatgattctgtaggacagaagccgtggagggccaccttttttttttttatctacactgaatctttttaataaaatatgcttggtgtccatgtgtttttaaggttttttttttttataacacgttagaatagttgctcatgcactctgacttaatatcttatttaaaagttatcagcttaacaatttctaagtatatatagaggaaggctaattatattaacatggttgtgtaagtagtctcaccagtatagggcttcatgcaggaaccacctcgcctgtattttttatgtgtgttctggggattatgtataaacacaagttgtcacgcttttgctgcaggcattaattcccagctcctgagatacatgtaattttaatggaaaaaagtatttttctaattcctaatgagtatatccaaatagcacaagactacacttaaccttttatggagctgttttgacttacaccgattttcagttgataattttctcaccttcacaagaaatgcttaattttcttctgagatggtatatgtagactctgttttgataccaggtcagaagataagtactctctagtggttttcagactttcagagtggaggcaaatgtgaataccgatgctatgcaaagaaatgatacaaactttcttgcaactctagtgcttttcattgaaagtcgtcatttaaaattgtgtatttcaggttgtacctacaacagatcatatagatacagaaaaattgaaagccagagaacagattaaattttttgaagaagttctcctgtttgaagatgaattgcatgatcatggtgtttccagcctgagtgtgaaaattgtgagtactcaaattaatcctccattctcaccagcggctggtgtgatgccttgtaaggtttaagtctacagcacagctttgtgacatttaccagaaacaatgatatttagtctttttaaaaatatacctgtccagcatcttttggttatttgcttattattcaacttgactgaatgaaaactgtgacttaatttttatgttcataattaaaaatgatatttgtagaatctgcaggtagcatgttggatggatgctttaggtatttattttatgtttgtgaacgttttgctttcatgcactacacgagtgcctggtgtcattggaggtcagaagaggacattgcatcccctggaactggagctagagatggttgtgagccaccatgtgggtgcagaggattgtagctgggttctctgcgggagcaacaagtgctctcacagctgaactgtctctcgagaacaatggcccaggagttaggattttagtgtatcataaaattatcaggtcattctttagcataaaagtggaaaacaaaaaacaacaagtatacaagtataaatgatcatttcctattatattgttgtctatcagtagaggacaggctattactgttcatatgctattggtgaaacatgtttataagaaatagataactgggtaacttgactgtactgaagatatgggagcagttagctacttagatctgcatactgagtaactatgactgtgacagctaaacatgtagccagacagctactcaacacggacactgtccatcatagtgatgtaacttttgagtgagatttgtatttataagattgtcatatcatttgtaatagatttattttaacctacataaaagccaggtgagctatctgatagcccggcatgcagaagagcctcattggctgcactgacctggagcatgcatacactgtatgatcttattttatggaaagtgggtgaacataagtcgcaacaaagaaggaagtggttcttcaattttgctagtattgatacatggtatcagtatctttcttaaaaaggaacattgtatttatagtacttgggtatgttttaagtcatgtatgtatgtatgtgtgtgtttatgtgtgtgtgtgtgtatgtcatgagtgttcagaggccagagtctgtatcatatgtcttctattgcatttctacttgatttcttttttgagaaagggtctctcactgaacctggattttgctaatcctatcactgcctcctcagggcaggactaggcacatgttgccatgcctggcttctctgtgggtgctagggagcaaacttaaaccctaatgcttgcagagtgcttcactgcttgagccacctcctcagcccaagaagtatcggtctcatctgtggttttggttgtgagtacacaggtgtgagcctgcatatgtttaaatgcacaaccttgaatgttgttcctcaggtcccatccaccttttctttttgagactgtatctctcacttgtccagactaagctggtgagcccagggatccagatatcagtttgtatctgctttcctcacaaaccaaccttgttaaataacctgctaaaggcttcgaggccagtggaactagggtagagaacctcatatctagctggtgcctgtgttggaatgcttcagcttatcgttattttggctttatggtggtgtcaaagtataagccttcattcttaactatactttgttgtcttagttaaggttttactgctgtgaacagacaccatgaccaaggcaagtcttataaaggacaacatttaattgggtctggcttacaggttcagaggttcagtccattattatcaaggcaggaacatggcagcatgcaggcagacatgatacaggaggagctgagagttctacatcttcatctgaaggctgctagcagaatattgacttccaggcacctaggacataataaaggccacacccatggtgccatgcctactccaacaggagtacaccttctaatagagctactccctggactgagaatatacaaaccgtcatatttggattttggattcttttctatcttatcaatgtgtgcaagtgaactagatctggtcagcatccctgcattgctgagctgtgatactgaataggtctgatgtgttaaaagcatcttagacaggtatttccgtctattgggcttttaggacatagacatagaccagggagaatcatggtgaatttgcaggtttttttcccccaatgtttctctctctttttttcttttagtaaagaaataaagtatgtacttgtcattaacgtttcaacgtactgtcttttctccccagagagtgatgccttccagcttctttctgctgctgcggtttttcctgagaattgatggggtgctcatcagaatgaatgacacgaggctttaccatgaggtaccgtgctcgtgtgatgagtgagctcactgatgctcactgagcctcttatgtgtctgtcgctttagaatgtgagattgtcatgtttcttgttctgtggtcacctgttaactcatacatttgacttactgactacacactgttgttggacacgctgtctttttttttaagttctagtaatcaaaaaaggttttataaaaaaacgtgtcctgggtatgaatgctttgaccaaaaaatttgtatacatttaacttgtgtttaaggaaaactgtcccttagcttctatacgatgtcctgttagagatccctcttcagggccagatggtagtagcacacatctttaaccctagcacttgggaggtagaagcaggtggagtacttgagttggagaccagcctggtttacagagctaggtctaggacagacaaggctacacagagaaaccttgtctttaaaaacaaaaacaaaacaacacaacataaaaagaattcccacttacactgcctcctgacgtctgtattacatggttacttggtggttattctaagggtggaaaaatgctgtcttctgtgaaaaagtaactgataacatgcaggtcttaagtgttaaagagagaaggagtttagattgggttataagaatttttccagtagctttagagcaccctgtcttttctgaatacttaagttcaaaattgggatcacattggatgaagaattagaggagataccaaaactattagttatggtcataatagctcgtgctgtggtaactaagtcagaaaaggttatgtagctcacttaaggtacccagtaagaggcagaattgggttacattgacattttcccccaagtcctttatttagacatttgttttccccttgaaacagcacagtgactgtgattatgctccccctcccccacccctcctcttttcctcttctcgttgttatgtagccctggctgttctagaactctgctgtggatctggctggtctcagagaaccaccttctctactgggattaaaggcacctcttacacacctcttagccttttccctttgtataagcaaagccaaaatactacatttttctctcatctaaatctcaaaaatactgtttatacttaattatatttttaatgaatttatcctaaaaggttctattatacagtaatttataaatatttattatgtagttgatcagttgtatatacttgaatattcacagcagtattgtttatataacatgaaggaacttattaatttgactgatatgtttatgtccatatagtagtagcagaaaaatagacacccatcaacatgatggtagagaataaaatagagctaatttggaaaggtggttattttactgttgaattttgaaagtgtagtgtgaacttatttaaatttgatgtagaggttttgaaatgatcaaggctgtgttatcagaactagctatggttgataacttatttttcttatttatatttttattgactatggtgaacattaatttttttcttgtttcttattgatatattttaaagaaatataattttgtagtttttttaaactgaaaagtgtttatccaaaagcaaattgtaatacatctttctttctttctttctttctttctttctttctttctttctttctttctttctttctttctttctttctttctttctctcttccttccttccttccttccttccttccttccttccttccttccttccttccttccttctctctttctctctctttctctctgcctgcctgccttctctttcccctccctccccttctctctttcctttcttttcttctctctctctctctctctctctctctctctctctctctttcttgtcttaaatatgtctctggctgtcttagagcttactgtgcagaccaggctagcctcaaactcatagaaatctgcctgcctatgccttcctagtttgctgggattaaaggcatttaaccacagtgcctcacaaagtgcactttttttaacctaactttaaaagtcttaaatggctgaatttgaggctagcctggtctacagagtgttccaggacagccagggctacacagagaaaccctgtctcagaaaacaaaacataacaaaacagttttatatgggaaaacggtacaaaaggatggtttgtttatttacgtgtctgctttatagggaggattttataatatacatatataaatatattgtaatttttgtatttttaaatataggctgacaagacctacatgttacgagaatatacatccagagagagcaaaattgctaatttaatggtaagtacttaaattttaagtatttagatgttgaattttaataattcattttaagtctcatatcccactaatcccacccattcatctaaatttgcatcagaaaatgtgtgccaaggaccagcctctgcttgggagttctgtttgaaagtagcaaaaaacacacaactggaagtcaagtctcaggacaacctatgttgttctctagacagctttctcttgcaggcctaaagacatctcttgaagatcacaaacctagttttttatgtagatatcaattcagtcattaccccaggttcccttttgattatcctatgagtcaacatcccatggcctttggttcttaggagacagcaagcacactttttattacagagcccttcagatatctgtcagcctttgttaagcacagagataagataacaggatggggcctggatctaaattccctcagtcacaggctgacctcaaacccagggatctgtctgcctttttaagcatacaaaaaaacttagctgggtaggatctccgtcaatcaccactccctaactctctgtatctccttccgtagtatcttcctgaccagttggctcacagcacagctgcttttgttcctttagattagtgaaacaccttgtatagttccttatattttacatagttgagaaattatatatttttgagctcatgttttcagagtttttttacagccttaagggctgtcctgaaggtcccagggtttaccattttactgagacattagctacactttcgcctcctggactgatggagtcattaatgttaacagggaggacattcctcaaaggaggaacatgaaaatacttaaattatacaaacaagccctaggccacagcagccatgacatcatggaggcctctgccctgttccaggcgtgggaaccacgtccttccaccccttccaaagaagatgtgctcctcctgggctctgcagggtgggtctctcctgggtttgtctccagcaccagggcacctggagatcttcgctgccatccatctgagtcctgttcattctgaagaagctgagaggcaggggtgtgacctgagtcccatcgctgcagctggtgccatggatgttcctctgacttagcacctgaccctctagaatgtttaataatttattcatgttttgagattatactagagttccataaattttctctttcccctccaaggcctcccatgtcctgtatctccttagtctttcaaattcactgtctctttcttccatcattgtaaacatatagatgcatcctacttcctctgtgatgtcacttgtatgtatatgttcttacacatccctttttcttccaaaaactggtgcctctgtaccagcatctgtaattattctgacataattttcctgtattttttgctcccctggaatttgtgaagtccttccgtggcacttgggttttgtgatgaactggcttagtacatgtctacaaaataagtattttttttttaaaccatagtacttactctgtctgaatatagtgtatgcttggattagaatagttagtaactgtcgtagaatgtgtactggactctaactaaagattgaactttcaagttactcaagtaacgggtactagggagggatttgatcaaaatgtgtgggattcttttagcacttacagtagcactgtcagttatgacaccaagttccttgaagatcagccacacagttgaacgattgagtaacaggaagcagctgttatctgggggagcactcaatgctcctccttacgtggagtgtccccagggctgaaattagcatgctttgtgaactcttacactagaaggtttcagaaatcgtgtgagccataactgagaatatactaatacgattttatgtttttcctagcatgttccaccttccctcttcacggaacctaatgaaatatcacaatatttaccaattaaggaagcagtttgtgagaagctcgtatttccagaaagaattgatcctaacccagtggactcacaaagtacgccctcagaataaaatgtggtacagcagactctctccatgtggaacctgactggaaaccttggctatttgtaggggtatttttattatgagaattaatttccttgcttatgcgcagattttctgtagccttaaaggaaaataaaagattgctgcaggcaggttccacacaactcctgtttatcctgtctgttttcaagttcctgctccagagagagatgtgctctggagcttacgtcagcagtgatgtgtgtgggtctcatgaggggacatggtctgcatccggcctgaagcatcgtcttcactgtgaggaggctgactgtaaggctgtcactgagccccgatgcctgggacctgccggccgccataggatgctgactgcatgctgatgtgctactctggctcttggctgtgggctttctggtgtttgttcgcacttacggagagttgtgacatgtcacctacaaaattaatcttgtattagtcattagttggagtttctgggcaacatattgtgtgtgtttgtacacacaagtattttttaaatcttttcatttaaatgtctttgtctctgagtagtgttagattacttattttgataattcattgttaaaaattgtggagaattaaaataaaataattgactttttaaaaaaaattaaagaggtgggcggtggggaggaggagtgtgcatctgaagattgtattagtgtatccctgtgaggagtacccaggtgtgtccttggccatttctaaatatgacatatgccattttatatttatttgtccaagtgtcttttgtaagaggagaataaataataaggaattatgtattcatagtttgctgtttatttcagcttttcttagacttacttgaagattggattaggatgtatcgttctcatttattttgttctgaacccgttcagtattgcagacacatttcccacgcagattacaaatggaaactgctaggtatgaacgcgatcccctagtttgttcgcctttaagcgcctgtctctcttctccctctgctccttacactcctgagggcacttttaagtagtcagaacacatgggtacatgtcatgcatagcatccccttcagttctgagtaccgtgttctctgatgtggtataagggattacataatgaagcgatagaatgtggttggtcctttatacggcgagtgctgtgtatgtggagtcatccggctcctcatcaaacagttgaaaacatcccagcgattatgaccacgcacagactttctgttgtcattccctgactgtcagttttagctatttgccttgtattaggtattatgagtgaaatacagggtaatttatagtgtatgagaggatctgatggcttattttttattttggtatttatgtgaatgtgaaccaaatctcctatggtgaccgagacaactttttgtggggttaaggtccgccagagaatgcagaagcatctacacgtggtgtcagatgtgatggcagaaataacaacttgagaaagatgggaggagcgactttggtattcctctctgcttttgaagaagctgtcgcaggccttgagattgtcattaccataaccagggaaaaagccaggcagtcaaaaaaattaccatgccttgaacaactgaaagtgggattacaaaacaaactgaatctcaaagaatgggaagctccaaggagaaaaaggacagagactgcctcctcttcagagcacaagagaaaggtggctaatatcaccacagccaacatcttacttcaagataatcacatcatttagtcttcccttccgtcctctcagcctgtcatatgctcctccctgctcttttcaaattcatatatgcatgactgtctagcttctaaatatataagtacaacctgcccacactgtataatgttacttgcatgtatgttttcagggctgaccatttgaagttagataactaaattatgctgttccctggggaagagtgtttgcacctgtctcgacattccttaatttactgtagttcattgtgtaggatcattttacaagttcttttttttttaaaaaaaaagatctattctgtatatttgagtacactgttgcagtcttcagacataccataagagagcatcagatcccatttcagatggttgtgagccgccatgtggttgctgggaatcgaactcaaaacctctggaagagcaatcagtgctcttaacagctgagccatctctccagccccattttataaattcttaaaggctgtgtgaggactagtgtgtcatttttggaatagctacaagtctcatttaaggggacttactaactttctcagttaaggatttgcctcttagatccaaaggtctgtgcctggaaaagaaccaagcggagctcacgaaagtcctggtaaggaggccaggcaagcaggaagtaactggggacaggggtaaagccctgcccacctaccctaggttccgagctctgaagggtttaaatgccttagggtgttgtggggaaagctgcaaaaacctgttttcatccctattgcatctgacaaagcctacttgcccctggaggaggagtggagggagagtcctggacaggcaaaggacaattcctaccaaagaaggaatggaagccaaacttggctgacttgatgaggaactggaaagcagcgtggaccatagttgcatatgcagaatactgaggactgctgcctctggtgggagggtgctggtgacgttcttcacttgggaccattgatttaaggttgggtttcccccgattgctgaatgaggtgcaagtgtcgagaaggccacatcctgaaaaccagatacggctgcccacagcaggctagccaaggtcaacagagaaaactttcctgtaccccaaagtgagcctgggggccactaggtaagaaggaaaccagtctatgtcaaaggaagaacaaagtgttgctccctatctcctaatggagtaggcattggggacctaaagctgaggataagcagtactttaaaacacacagactgctgggaagcgtggaattccagctttagtttgaactacatggtgagactttttctaagaaaaccaaaggctggagatgctgctctgcggttaagggtgaatatgcttaagagcacaggttcaattcccagtagtgcagaaacaaaaacagcctgttagctggggtttatggggacagtcatacctatgggaatacctagtaatcatttggtgattggatgatgagggaagctatgcaatgggcacatttacttacataacgaggcaagctttctgttactcatttctcacaattataaaatgtattatgaataacaaaacatcataactgataatgcttgttgtagaaactagagatgctctgatttcttcttccttcttatggaattctttttcatttgtttgaaatactctgagaatctaatacatatacaatgtggtgttttcgtcatgtttactccctacttcatgtcttcctggaccactcctccccaacttcgtcctttttcctttttctttttccttttttttttctacccaccaagtccaataagtgttgcctatatacttatgagtatgggcacatccactgggccatcagttgtcagcagctcgtcagctaggggtgggggggtcaataacgcaacgcttaactgaggtgatcaaatgattttctcatccgtagatgagtaggcttttaaccttggcttgnnnnnnnnnnnnnnnnnnnnggggtttatggggacagtcatacctatgggaatacctagtaatcatttggtgattggatgatgagggaagctatgcaatgggcacatttacttacataacgaggcaagctttctgttactcatttctcacaattataaaatgtattatgaataacaaaacatcataactgataatgcttgttgtagaaactagagatgctctgatttcttcttccttcttatggaattctttttcatttgtttgaaatactctgagaatctaatacatatacaatgtggtgttttcgtcatgtttactccctacttcatgtcttcctggaccactcctccccaacttcgtcctttttcctttttctttttccttttttttttctacccaccaagtccaataagtgttgcctatatacttatgagtatgggcacatccactgggccatcagttgtcagcagctcgtcagctaggggtggggggtcgtgagcccctcccacctccatgctgcactggtgactggcttcatcttgtgcaggcagccacagctgcagtgagttcaggagagctgtcatggttagaagactttttttgtttggttggtttttttgagacagtgtttctctgtgtagtcctggttgtcctagaactcactctatagaccaggctggtctggaactcagaaatctgcctgcctctgcctcccaagtgctgggattaaaggcgtgcgccaccactgcccggcttagaagactttttgaccctgcttagtttctttgctaacatgcctactgtagcttccttctgtggctcataccaagatgcttgctgatctttcctatggcatgatctttcctatggcgtgcatgtaagttaagcaggaggctggttttgccttacagcttaggaggttagatggtacttgtggaaaatcagcctgttgtgatatctttttgaggaaaactgttgaggtgcttggatccacgtgagttttaaggctgtgttagtcttgcagccacaggactctgtggttgtggcgtgggcactgagtatcccagaccaaaccccatctcagcaaatactctttggcttaggtccccaaagcagactcagaaaagcatgaggaggctggttatttgaaaggtgaaggacagcagagtgagaggaggagaaataagggcgaaaaaccaagtgtgtgatgaacaggtaggtccctgctgtggtctagctggccttagtcttggcagagtattctgagatcctgggatacactcatgttgcttcaccaaaggaggggagggagacttggccatttacattcctatcctatagctgggatgggaatccagaatgagggcttgtggagagctgtgccgtgagcaatcgccattataagatggcgctggcttccactgcgcctaactagtaaacaagccttataagaggtagatcgcatagcaccatggtttgcgtgctcagggtcctagtgcacatccgccttatgtacagaggtatcattcagactcattcattccaaaagaggaacaggaaaatgcaacaggcatttacagtttttgaaggagccgagggagggcgagttcacgctccagtagagtatatacagattaaggagcttgctgaagcagtccataattatggagtcagcgctaatttcactgtagcacaagtcgaaaggcttgcgactcacgctatgactcctggtgattggcagactgtagtaaaagctgcagcccccagtatgggaatgtatcttgagtggaaagccttgtggcaggactcctgccagacgcaggcaagggccaatgccaccatggaaggggaccaaagaacatggacgtttgaattgcttacaggtcagggacagaatgccgctaaccaaacagattatcattggggagcgtacgctcagatctcagctgccactgttaaggcatggaaggcactctctaggaagcgggaggcgagtggacatttgacaaaaatcacccagggtgcacaggagtcattctcagattttgtggccagaatgacggaggcagcagggaggatatttggagacccagaagcagctatgactttaattgaacaattggtttatgaacaagctacgcaggaatgcagatcagcaatcacacctagaaagagtaaggggttacaggactggttaaaggtttgccgtgagcttggagggctgcttactaatgatggattggcagccgccattctgcaggggcggaggcgctcggaccctgaagccgacagtccggaggctgagcagcaagctggctttcgccagctgcttttggcctttttctggactgattagcttgcattttatctggctggtacctttctccctcataacaagctgcttcctcctccaagtccgtttcctcagaggggctaagttcctcatctgattctgagctactaagagctaggtccttaaactcatctagtggcaggtataggttccttctcctagggccctccgctgattgatctttcttctcttttccttctccttccttccaaactcaccccaggtattcttccctgacattatcttttcctcgggttcaagacccgtggaaaggtctgtatgcttaattggtgcaccatgtgtcctctttgctcctaatctctctccccgctctacctctgaatttcatccagaattctctgccctgccttaaccacttgttgacattcctcatcctttaagcacgatcttatcagcttccacaacggcatggctcctgctttaagtttgccattctccagttccctaactaaatctcccttgagtttctcccaagaggggatagttaaggaccctgagcacgcaaaccacggtgctatgcgatctacctcttttacaaagccttctagtgtcttggtggcgactttcaagccactctgcctcaggaccgaccgtaaggcggttactacagagtgggaggtccccatgctatcttcttgccttttactaactgttcctgacctcgactgagcaccagttagcaattccaccggtggaaacagtacgcaatcaaaaagaaaaggaatgagccctgtgaaaaggaacagaaaggcttctagtatctcgctggcaagaattcactcggacaactggatccttctacggcaaagcttttattgcttcaacataaggaagaccccgaacccagaaaatggcgttgcttatatagcccacagcgtgacgtttcagcacctgatgtgtcgtgacagcacctgattagttgctcgcccatcaccccattactacgccccgagatgggcagtgactgggcgtgaattcactcttgcacttgcgcataaggcttgtttactagttaggcgcagtggaagccagcgccattttaaatggcgattgctcacggcacggctctccacaagggctctactctttgaaatgctcacttgaccaagcccactcagtcagtcaacaggttctccagcccgggagtgaggattaagaagaaaaaagacaattaagcaacattgtagcatggcctcagtcaattctgagactgaaggcaggcttagtttttcccaatctgcttttttataccattttaattacatgcaagtattaagggtgactagtacaatgaggagtcaagcaagacaatagtcaaggaacaagcaagacagtaaacacaaagtcccatgatcactctggtggtcgctttttctaaggataatcaagatatctgagcctacttctctgttctaccctagaatcagattcttacttccttgaccttggccaatgtcagattcctgcctggacttacttcttcctcatggcctaatgtcagattcctgccaagcggcaccccaaaaggctctccacacttactgctacacaatacacacagaaatgcacacgtgcttggctgcaagagagaggctgtctgcttccaggatgtccactcagtgtaggaagagacatgttagttgagggagatgaggtgggcaccggcagcccttgttacaaagtggaaaagtgttttgtaaagcagtgtcctgacatctctaatctgttgttaacacttcccaggtgtgtgtgcatttctgaacctagtttattttatcccacctggcattcaggcagcaagaggtatggcatcttcagcaacctcagagtgggttaactcttcatgagtcagagaaaagagaagagaagaggaggggaggggaggggaggggaggggagagtcagacacacatactggatgaagcagaaaaggctatactgctactttattgtttttataccttctcaggatcatatgtttttaaaaacatttttacattccataaaataaaaacataagttcatagtatctttaagccaatagttcatgtcataggttgttaaggcttaaggagtcacagcaggattgtttacatgtctttccattaagactagtacctgactaaacattcattatctgtcttctagtccccagaagtttaccagaagtttaaaacagtttttatgtcataaattagcatgcttttatcaagagacaaatcatctgtcttgtgtcttattattttgaagtcttgtataaactagtccatcatttactttctgtccttgcacccacaataaattgcctattcccagtttatagcagtagcctcattcctaacatagaaggaatgttttccttgatcataaatttgttccaagcctgctttcttttcctagagcaattagcccgtggcacatgaaggtttacagagctctgtttgcagcttttattctgtagggggcttgagattacttgtatacatttaggagttctataaaatcattattaggaattataaaatcatcaattcatctataaagcatgaaagtacatcttcatattgatctgcaggaaatctgcccaatagggtgggctaatgcccaggaatcaggaatcagtaggctatgtaaggcgggaaaggaatatcaacaccaagaagcaatcctggcatgaagtctctgaggatcctgcatcccatagtgtacccattgcagccatgcagaatggtgcgccatctctagaaaactcacttgccatagcctttcctagatggcttctgacacctgtctatacaagtgcccctttacaggatggctgtattgccttagaacagcaatgctgccataatgtaaaagtggtgagaataccaaacactgttggtaactctttgcctccttttcctgtctctaaatgaccacgcctctctcctaagagactttagggaaattatctgaactctaccactaaggtcagtcgtaggctttgggaaacagtgagtttccccctgagcttagtgcctcccaccatggctgtattattggatgattgtacataccctgcccctggaattggaggcagcttttctgcattatggaaagatactgatagtcatgcttttataggacctgtggtaccaaaatagaaatataataaaccctatcctgactggttcagtcaaaggcccctttctacttatttcacatggtggcgaacacctttaatcctagcacttgggaggcagaggcaggcggatttctgagtttgaggccagcctgttttacagagtgagttccagggcagccagggctacacagagaaaccctttctcggaaaaaaaaaaaaaaagaaaagaaaaagaaaagaaaagaaaaagaaaaagacttgaaaacccattgatacagggaggaagtgtgggtgcccagagcagtctccatgagagacatgatcctaagggatctacggtctagcatctcgcttcacagcttccaactctgacttgtgaccactcagaagcctgacttttttttttttttttgatagtagcaggatgaatatggctacctaggatgttaagaatctcatcaagccgggaagtggagcacacctttaatcccagcactcaggaggtagagataggcgaatctcagttccaggccagcttggtctacagagtgagttccaggacagccagggctacaaagagagatcttgtgtcaaaaaacataaacaacaacaaaatttgtgtcaaaacacagctgaagttgggggtttgcatgctggccccaggctctcatggctgtatagataatccctcttcatgtaggtcccatcctgtgtgaggaccactccctccctctaccctccaacttcagctgggcaatggcttttagtcttgtcatctccggtctcttagatctttccgttaaaatcactaagtgtgaagcatgtctaccttgactgattccatgcctcagtgctgagaggcccaccttctttctgtttcttggtgactgctctacagtttcctgcatgcagactacacagactactttgttttgtttttttgtttttttgttttttgagatagggtttctgtgtagccgaacacactctgtacaccaagctagcctttaactcagaaatctgcctgcccctgcttccagagtcctgggatttagaggcatatgccaccactgcctggctgtacacataccctgaaaacactgtgttttgtttaagctctggttcaggggagtgatttaatcaggcacccacagaatctcccacttaagcttcctggttacagagcctggcaagacagagtggcagaatggctatgcagagacaaacccctcagcctggggtctggtctgcatctgtgctacataatgggccacgaggagaacagtgtcaagtcatctgagtggagagtgggggaggctgttatttgacgtctacctcatgtcccagacactgtgcttggtgctgggaatgcagataaaatctataccctgaccagacccaagctccagttgagagacagcataccatgccaagtgacaggctacaggcaaggtaagatgacatacaagatacaggcaagataagaaaacttgctggagatgaagggacaaggggtgtaggagaagaaaaggtgttttctggaaagacacagtgaagatcattggattcagcagtcaccacatcatgaggggagca

SEQ ID NO: 1093 - DNA, 1579 bp, Mus musculus
ggcctacggcgcggcggcagggggcggggccgagatggtaacggacgcgcccaggagccgcgctgcagagagggccatcgtgcgaccgctgccgcaggcgcttgctccgagtaaccctgcggctccgcttctgccatgatgatccacggctttcagagcagccaccaggacttctccttcgggccttggaagctgacggcgtccaagacccacatcatgaagtctgcggatgtggaaaagttagctgacgagctgcacatgccatccctccctgaaatgatgtttggagacaacgttctaaggatccagcatggctctggctttggaatagagttcaatgctacggacgcactgagatgtgtgaacaactatcagggcatgctcaaagttgtacctacaacagatcatatagatacagaaaaattgaaagccagagaacagattaaattttttgaagaagttctcctgtttgaagatgaattgcatgatcatggtgtttccagcctgagtgtgaaaattagagtgatgccttccagcttctttctgctgctgcggtttttcctgagaattgatggggtgctcatcagaatgaatgacacgaggctttaccatgagcatgttccaccttccctcttcacggaacctaatgaaatatcacaatatttaccaattaaggaagcagtttgtgagaagctcgtatttccagaaagaattgatcctaacccagtggactcacaaagtacgccctcagaataaaatgtggtacagcagactctctccatgtggaacctgactggaaaccttggctatttgtaggggtatttttattatgagaattaatttccttgcttatgcgcagattttctgtagccttaaaggaaaataaaagattgctgcaggcaggttccacacaactcctgtttatcctgtctgttttcaagttcctgctccagagagagatgtgctctggagcttacgtcagcagtgatgtgtgtgggtctcatgaggggacatggtctgcatccggcctgaagcatcgtcttcactgtgaggaggctgactgtaaggctgtcactgagccccgatgcctgggacctgccggccgccataggatgctgactgcatgctgatgtgctactctggctcttggctgtgggctttctggtgtttgttcgcacttacggagagttgtgacatgtcacctacaaaattaatcttgtattagtcattagttggagtttctgggcaacatattgtgtgtgtttgtacacacaagtattttttaaatcttttcatttaaatgtctttgtctctgagtagtgttagattacttattttgataattcattgttaaaaattgtggagaattaaaataaaataattgactttttaaaaaaaattaaagaggtgggcggtggggaggaggagtgtgcatctgaagattgtattagtgtatccctgtgaggagtacccaggtgtgtccttggccatttctaaatatgacatatgccattttatatttatttgtccaagtgtcttttgtaagaggagaataaataataaggaattatgtattcat

SEQ ID NO: 1094 - protein, 213 aa, Mus musculus
PCGSASAMMIHGFQSSHQDFSFGPWKLTASKTHIMKSADVEKLADELHMPSLPEMMFGDNVLRIQHGSGFGIEFNATDALRCVNNYQGMLKVVPTTDHIDTEKLKAREQIKFFEEVLLFEDELHDHGVSSLSVKIRVMPSSFFLLLRFFLRIDGVLIRMNDTRLYHEHVPPSLFTEPNEISQYLPIKEAVCEKLVFPERIDPNPVDSQSTPSE

SEQ ID NO: 1095 - DNA, 43172 bp, Homo sapiens
gcgcgatctcagctcacactacaagctctccgcctcctgggttcacgccattctcctgcctcagtctccccagtagctgggactacaggcacctgccaccaacaacaccagttttctataaagtggacacagttacttcaatagttaacactaattatggtaacatgatatagtgcagctgtttccctttataaatgattctcaaataaacctatttactcatgttccattagctgggttttttttttaatttttgtatgagacagagtctcgctctgttgcccaggctggagtgcagtggcgcaatcccggctccctgcaacctctgcctccagggttcaagcgatatttgtgcctcagcctccgaagtagctgggactataggcatgcaccaccacacccggctaatttttttttttttttttgtatttttagttgaaacggggttttgccatgttggccaggctggtcttgaactcctgacctcaggtgatctgcccacattggcctcccaaagtgctgggattacaggcatgagccactgcgactggccccatcagctctttttgccactttgcatgccatacacttaaatctatcctgacaatgtgtacatgtattatatatatatatatatatgtatatatatatatacatatatatatacatatatatatgacagagcattaaaatgtttatgtaatgaaaactttgccaaaaaataacatcaaagacaaaaatcaatagaaacaattctattgatttccaagatgatccactataacccagctgagtgctctgagagaactaattacagcataagctggggaccactatgacaatggccacatggtgggtgctgatccgctctccagacagctgaaaattcactttccttgtcaattcaaagaaatggtttagaagataaagtagaagtgttaattctcctaatttctcataatccaaaattagtgtatatcggattatgactgcagatatgaaagacctagaagcctgacttataagtagatattcctattttgcatatttggtaagcctacatatagtaattttatctttgacttttgactacagtttcaccttacccagaaataccctaatatttgctttacctctttacccatgcttttgtgggtcctcaaaccttgccagggtgctgggtggacattaggtctgcttttgactacaaaaactgtaaaataaatacaggttgaattttataactttttccatttctccttcctcttttcttttttctttttttgagatggagtctcactctgtcgcccaggctggagtgcagtggtgcaatctcggctcactgcaacctccacctcctgggttcaagcgattctcctgactcagcctcccaagtagctgggattacaggcatgtgccaccacacccggctaatttttgtatttttagtagagataggggttttgccatgttggctaggctggtctcgaacccctgacctcaggtgatccacctgccttggcctcccaaagttctaggattacaggtgtgagccaccacactcagccactccttcctcttttcatattccactctattacctttgtctgccagccctatccccatccactgggcttgcctgtactagcagtcccacattaaaactcctcttatttctcccctaattagcacaaaggccagttatagacattgaggatgtgggagcatatgcctctgagaaccactgtccccaaaaccccatgggcttataccagcatgaccaaatctagtcatggttgattgggccatgatagacacctgactcaagctgagccaatcagattctctcttttgagaatgtgaaaggcgaaccaagaaatggctatcaagatgtctattaggaaactgtgttttggatgggtgcaggaagcacacacaaagagaagctgacagagctggtctgcaaaaagagagaaggaagcagagagctaaactgaagaagagaacaaaagagagatgaggagccgtgagagagttagagagactgtgttcagctgaccagcaccccaggtttttcagttcctcagtcctttgctcttgaggcctgattattcgctttctcctcacatagcaagaggtaactccaaatcctgaaatcattctcttcttttaagaataggctgctttgctaaagctagtttgcagagagtttctcttactttcaaccaaaagtaactcaactaaggtactacacccttagggaatgtgtttttgtgtttaggagtttcatcatcactaaactgagggatcctgaggccttcttcaggcctataaatcctggagactgttttaggccccaggctaacttcctgtgagctgctccctgttcccaggtctccactaattatctcacacatctgctgcttccgtccactgttcttttttttttttttttttcccccccgagatggagtcttgccctgtcacccaggctggagagtgcagtggcacgatctcggctcactgcaacctctgcttcctggttcaagcaattctcctgcctcagcctccagaatagctgggattacaggcacgcgccaccctgcctgcccaattttcatattcttagtgggggcggggggggtttcaccatgttggccaggctggtctcgaacccttgacttcgtgatccacctgcctcggcctcccaaagtgctgggattacaggtgtgagccactgcacccagcccgtccactgttcttaggaagttttcttctttgtggcctacttcagaacagaacaagggttcctaactgctgcctcctctgttttgttttgagatgcgcacaattccttttgaggaattttttaaaatttcatttagacagctgattaaaaacagggagtcatcgagtggattttttaagacctgggaggaaaataacagaaagtgagattggtgttcagaattaaaacactctaagatccttatgttgtttgacaggaggatagtaacacagattaacagactttgttaagtatgcatgttaaaaatttcagggcagggctgggcagggtggcttatgcttgtaattccagtgactcaagaggccaaggcaggaggatcctttgaggccagtttggagatcagcctggacaacatggcaagaccccatttctacaaactttttaaaaaaattagccaagcatcgtggcgtgagcctgtagtcccagctactcagaatgctaagacaggaggatcgcttgagcccaggagttcaaggatgcagtgagccatgactgtgccagtgcattccagcctgggtgacagagtgagaccctgactctttaaaaaaaaaaaaaaaaaaaaaaggagggggaccactaaacaaaatgaaatagaatatataacttaaatatttggcttagtgcatgttaagccagaaaactagggagtctctttgatgattataaatatctctggcctcttatagccatatggctgacatagcagaaaatgagctgcagttgtggtcctacagtttgctgcatttcatcgtaggttcgcatgcttgtggatttcttgtgtgaatttaggacatttatttggccaagagtgggaaatttatagttggagtagtaagatttgggaggacttcaagtaccttgatcctgtaatccccagctccttctctctctgatgaagtcatttctgatgtgaagacacttggatgacctcatctgaggtagctaacttgcaagggggtgcaagctctctttgtgccccacacctaccacttctcatactcatacatgctgttccatgctttcatccctatgcatcttctgttccttgtccttgaagtagactgtctccttctggtgaaatcttatttttactttaaaaccttgttctgggatcagttcctttgggagtcgctcctgttctccacagaagaattaattactccttccactctataccatgtccatgtatacacaccattttattgcccagatgtcatggtattctttgcatttatttacttttaaaataaaaatgtcacatggaagggggaatatgatttttccatggtgctccagagggaaaagccaggcccaaagaatataagtaacaaggaagtacattttagcttaacttaagggagaacattcttatcattagagcttcacaaatgacacaagctgtttagaggtggtaagcttctgcttaatgacatttttaaaaattgtgcattcatttaataagattgcttagaaaggatatggtatggcttacaatatgtacgtgatcaactctttgcctgttgctctgaactcttctcagttccttccactccagccacactggccttcttgctcttcctgaaatgggacaaacccattgcctccactggacctgatgctacctctgcctggaatgttcttcctccagattttcttgtggattttccttcttaccagcagatctctactggagtgtaaactccaaagaaagggctcaaactccaaagaaagggctctttttttttttttttttttttttgagacggagtcttgctctatcacccaggctggagtgcagtggcgcgatctccaatcactgcaagcaccgcctcccgggttcatgccattctcttgcctcagcctcccgagtaggtgggactacaggtgtacgtcaccacacccggctaatttttgtgtttttagtaaagacggggtttcaccacattggccaggctggtctcgaactcctgacctcgtgatccacccgcctctgcctcccaaagtgctgggatagaaagggctcttttgatcactctgtctttaccagtctgttccccactccccatattcttgccctctccacttaatttgtgaatgttctgcacaaaatctatcaatatctgaaatcataagttttgtttacttattacctatcttctatattacagtgcatcttccaagatgaaagggatcttaccttttttattcattcctgtgtccttataaactgtacctgaaacagtttctagcaccatagtagttgccaaaaaatgtttgttgaacacataaattttttataataactcattaataaccgactggttagttggttgttctcagcactgaatcttgaccaacttgaatagtagatggttgaatatggtggctctaacatccttttcccaatttggctgaaaatgaattccttccctccatcaagtcccagatgttattccatcccaacaatcacttttatagaacagatagttgatgcatgatggtacttgcatgtgctctgaaaatacccaccaatacccaaatatctctaatgtgtgtgtgcttgaaattgtacctctagagatttacttccttgtatcatcaaagaattacagtcttagagtcctgtaataaattgttggactggaggtcataaactggtttgttagattttatatttaaataaaaatatgcctattagaggatgtgttcataatatattgtctggaaaaattttgaaaagagacaaatgttctgggaaggtaggtaggaaagcagtgagtcctcagttctggaaacggtggcatggtacttctctatcaaggccagttcatagaaaattatattataacatgacttagggtaagatgcaaatgactgattatgtgaattagtggtctgttaccctatctagaagcagctgaaattttagatgataaattagtacatttactatggagaacagtatggagattccttaaaaaactaaaaatgggctgggtgtggtaaatcatgtctgtaaccccatcactttgggaggctgaggcaggaggatcactggagcccaggagttcgagaccagcctgggcaacatagcgagatctcatctctacaacaaataataataataataaaattagctgggtacagtggtgcctgtagtcccagctactagggaagctgaagtgggaggattgcgggagccaagggagtcaaggctgcagagagctatgaccatgcctctgcacttcagcctgggcaatagagctagaccctgtctgttaaaaaaaaaacaaaacaaaacccaaaaaacctaaaaatagaagtaccctatgatccagcagtcctactgctaggaatatactcaaaagaaaggaaatcagtatattgaagagatacctgcactcccgtgtttgctgcagcactattcacaatagccaagatttggaagcaactggagtgtacactaacagacgaatggataaagaaaatgtagtgcaggctgggcgtggtggctcacgcctgtaatcccagtactttgggaggccgaggcaggtggatcacgaggtcaggagcttgagaccagcctggccaagatggtgaaaccccgtctctactaaaaatacaaaaattagctgggcatggtggcgtgaacctgtaatcccagctactcgggaggctgaggcaggagaatcgcttgaacccaggaggcggaggttgcagtgagctgagattgcgccactgcaccactccagcctgggcgacagagctagactctgtctcaaaaaaaaaaaaaaaaaagaaagaaaatgtggtacatacatgcaatgaaggactatttggccacaaaaaagaatgagatcctgtcatttgcaacaacatggatggaactggaggacactatgttaagtgaaataagccaggcacagaaaaacaaacttttcatgttctctctcatttatgggagctaaaaattaaaacaattgaactcatggagatagagagtaaaatgatggttaccagaggctaggaagggtagtggagaggggcagaaatggttaatgggtacaaaaatatagttagacagaatgaataaaatctagtatttgatagcacaatagggtgactacaggcaacaataacttattgtacacatgtaatcccagcactctgggaggccgaggcgggtggatcacaaggtcaggagttcgataccagcctgaccaacatggtgaaaccctgtctctactaaaaatacaaaagttagccagccatggtggtgcatgcctgtaatcccagctactcaggaggctgaggcaggagaatcgcttgaacccaggaggcagaggttgcagtgagctgagatcgcaccattgcactccagcctgggtaacagagcgagactccatctcaaaaaaaaaaaattactaaaagattataactggaatgtttgcaacacaaaaatataataaatgtctaaggtgatggatatcccatttgccctgatgtgattgttacacattgcatgcctctatcaaaatatctcatataccccataaatatgtctattatgtaccataaaaattaaaaataaaaaaatttttaaataaaaagaaattttagatagaaaacaaaacctaatcttggccaaaggaacctcagaaaaaccttaaaaactgaattccaggccaagatgggaagagaggttagacacacctctataccttctcccttttaaagtttaggcacaactgaccaacattaaggttaaactagagatcataagactgacaaaacactctgtggcaataagataccatattataaacaagacctaggctgggcgcagtggctcacgcctgtaatcccagcactttgggaggctgaggcaggcggatcacgaggtcaggagctcgagaccagcttggccaatatggtgaaaccccatctctactaaaaatacaaaaattagctggccgagatggcgcgtgcctgtagtcccagctacttgggaggctgaggcagaagaatcgcttgaactggggaggtggaggttgcagtgagctgagatcacgtcactacactccagcctgggtgacagagcgagactccgtctcaaaaaaaaaaataaatacaaataaacaagacctgcgagccaggcgcggtggctcacgcctgtaatcccagcactttgggaggccgaggcaggtggatcatgaggtcaggagttcaagaccagcctgaccaacatgatgaaaccccgtctctactaaaaatacaaacattagccgggcatggtgttgcatgcctgaaatcccagctacttgggaggctgaggcaggagaatcgcttgaacctaggaggtggaagttgcagtgaaccgagatggggcctctgcactccagcctgggcgacagagcaagactctgtctcaaaacaaaacaaaacaaaacaaaacaaaaaaactatggccatgcaaggcaaggattaagtcatgccctacaaaccataaaatgtcgttaaatggttttttatgtgcaatggtataatgtgccttactttccaacctgactggtgtagaatcacatgacagatagcagactcccttttcttaagcattcctttctactgacttcaagtctttagacaaagcttaacactgttttttgtttgtttgtttgtttgtttttgagacaaggtcttactctgtcacccaggctggagtgcagtggcacgatctcggctcactgcaacctctgcctctcaggttcaagtgattctcccacctcagcctccctagtagctggggttacaggcatccaccaccgtgcttggctaagttttgtatttttagtagacacaggttttcacaatattggccaggctggtcttgaactcccgacctcaggtggtccacccaccttggcctcccaaagtgctgggattacagtcttgagccactgcacctggcctgtgtttttatttgtttttgagacagggtctcgctcacccaggcatgagtgctgtggcatgatcatggctcaatgcagcctctgaggctcaagagatcctcccaccacagcctctcaagtggcctgggactacaggcagataccatcatacacagctaattaacacggtttgtagagatgagggcttactctggtgcccacgctggtctcaaattcctggactcaagcaatcctctcacctaggcctcccaagatgctgggattataggcaggagccacctcgcctgactaaagcttaaatctttcaacagattgccgatcagaaaatctttgaatccacctatgatctgtaagcctctccttcaagacatcccacttccttagcctgaaccaatgtatatcttccatatattgacttattttacctgcaattcccaactccctaaaatgtataaaacaaagagtaatgccaccgcttcagatgctctttgttaggacctcttgggactattccctgggccatggtcactcatattggttcagaataaatctctttaaaaccttttacagaatttgttttttttccattaacaaaatcatctcattttgaggcaactgaagcctaaaatcgttagagaagcgctttgcccaaggattcacacaatagtgttgcaaatggagatttagcactaagtcagctgtgttgttttcactatactgggtgcctacatagcaactagaccatggaaagtcttcgcatatctacgaggatgcaatttttgataggagttggtcatagtcaagagtggctagatggccacttctaaatcttgttggtgctggatttcctaaactctgtgggattacttctttttttgacctcaaaacagaaaaatttcctctgtaacacgattcactaacacatgaggtaatcacactgctttgaggtctgtaaggatcaagttggaaccgtcatccccttccctggcagtccctaaaatccttcgagatgacgtcacccaacgagttcaagagggcggtgcgttcctaaccacaccttctgcaacccaagtgccgcccctctgactttctcctttttccttttttccggaacgccggaacgtaagacgtgggtcacgcaacaagagcaactagtcccggaagcaaaaagcaaagaggcggagaagaagacgggaagcagagcccgcgtccgggtcggccggcagggggcggggccgggcatggtaacggctcggaagcctaggaggctgggccggagggaggcggaggaaccggtgttcgccgccgccgctgcttcagcttattccttgtggcctctgcgggtcctgcctcagccatgatgatccacggcttccagagcagccaccgggatttctgcttcgggccctggaagctgacggcgtccaagacccacatcatgaagtcggcggatgtggagaagtgaggcttcggggcacggggtctgggcgctggccggttgctggcccagggcgggaggcagggcgaactctgtgcagcccctccccttttccctgaggcggaggttcggtccctccggaccggacctttgattgacaacttcgataaataatccagtcacacttccgggccctttggttggggatcgccaggcgctgctttcgtcaactgtcaatccgcctgggtttgagtagagtgtgactgttctggtggactttcccctcaccaaacgtctcctcctgcctcagcctgcaccacctttctttctgggtggctgttgcctgttttcttaggggttaatgacggggatgatttataagtttggtttctgtcacgtcaggtgctgtgcccggcgcttgagataggaaatataaaagacaacgtgcgcctcaattcacagtctcgtgagagagacaattatattacagcgtgaataaatgtaatgaagatgtatacacggagtgatgtgaggtcttttaggggctcgaaccatctgggaaattgggattcctgaactgaatctttataaaaccgttgcgggtggcggtggataggtacatgccatcaggtcaggcagagtgagttgtgatgcgtttttgatgcctgggctgaatcttgacaaaatttaggggaatcaggggacgcatgtaaagctgggggctcagggagagtgaaagctatgatgtgtttaaagagctgtgtccgtgtgattggagcgtgaggtaccatagggggtgttgtgagagatgagaggtaggccccaggggaatcaagatactgagggaatttttatgcctggctaaggagttttcaattttatctgacaaccactgggtgtaattttatccaaaggagctgcattatcagatgtacgctctgaaagatttctctggaggccatgttgaggctggattgcaggtccgcagggatgggaaggagaccagttagtaagagaaaagataggttttagaagattaagtccctgggatggccagctgatgggaggagaaataaaaaaggaagagtctatgctgatgacaagatctctggcttggatttttgcatgtatcgtatgcctttgaacaagatgagaagcacaggaggaggagaagcagatgggggcagggtgttggttagaggatgagtttagtttattgaaatgtgaggtgggtataggtcataaagtgaagatgtgtagtaggcatttagatatatttatcttggagctcaaaaaagataacgtctgtgggtttaagtttgggaattatctgcttatatttggtacctggagctttgggaatgaattaaggtatctagaagtcatccagaggaaaaggtcataaaatagaaccctaagtgagtacttgcattttaagatttgagcagagggagtgaccagggaagagaggaaagtaatgaaacgatgtttgcttcctaattcaagaaaataagtggtaatattctagtagactcactgaaaaaaattaggaaaatacagaaaagaaaggaaaaaaatttcccttcatctcaccagaaattgaattacttttttgagtttttcctctctatatctttcttttctttttttttttataactttttttttttttttttttgtatttttagtagagacggagtttctgcattttgctcaggctggtctcgaactcctgacctcaggtgatctgtccgccttggccccccaaagtgccgggattacaggcatgagccactgcgcccagccttgtataacttttatttattttttattttgtttttttgagacagagactcactctgtcgcccaggctggagtgcagtggcacagtctcagctcactgcagcctccgccttccaggttcaagtgattctcctgccttagactccctggtagctgagactacaggcgcgtgccaccacgcctggctaatttttgtatttttatttatttatttatttttaattttcttttcttttctttttttcttattctttctttctatttttattttgagatggagtttcacttgttgcccaggctggagtgcaatggcgccatctcggctcactgtaacctccacctcctgggttcaagcgattctcctgcccagcctcccaagtagctgggattacaggcatgcatcaccacgcccagctaattttgtatttttagtagagatggggtttcaccatgttggtcaggctggtcttgagctcctgacctcagatgatccacctgccctcggcctcccaaagtgctgggattacaggcataagccaccgcacccggcctcctctccatataactttctgtgacaaattgccgattggtgcaaaagtaattgcggtttttaattgcaaaaccgcaattacttttgcaccaacataatacaatatataattatattatatataaagcagtcagcttcaaactggggcccccatgtaatttacttacagattctctaagcgatggctgtatacatggagagttttaagggaataaaattccatatctacgatctccttatgtattattttaaaaacaaatttgcctgaggccgggtgcggtgactcactcctgtaatcccagcactttgggaggctgaggcaggcggatcacctgaggtcaggagttcaagacctgcctggacaacatggtgtaaccccgcctctactagaaatacaaaaaaaattatctgggggtggtggtgcaggcctgtaatcccagctactctgaaggctgaggcacgagaatcacttgaacttgggaggtagaggttgcagtacgctgagatcgtgccactgtgctccagcctggatgacagagtaagactccgtcccccaccctccgccaaaaaaaaaaaaaatgccttttttttatatgacaaaaggaagacttaccctcaccaatcccaaatttttctgtgatgcattatcatagattgtaaaaaccactaaggtgctaaataaattggttgggtaaaatattggattaaagaagctcttctaatgaatatttaaggcaccttaaaaccacaggagcttcctgtcttctctccttgtaactagttatacctgtttttaagtgggaagcttgatgatgttagaaatagggcattttcaggccgggcgcggtgactcacgcctgtaatcccagcattttgggagaccgaggcaggtggatcacctgaggtcaggagttcgagaccagcctggccaacatggtgaaaccctgtttctactaaaaatacaaaaattagccgggcatggtggcacgtgcctgtaatcccagctcctaggagggctgaaacaggaggattgcttgaatctgggaggcggaagttgcagtgagccaagatcgtgccattgcactccaacctgggcaacagagcgagactccgtctcaaaaaaaaaagagggcattttggcctatgtttaagaaactctatatttagaacactgaaggactgtaaattagtaacagtgattcttttacatatatgagtggaatattttataggactgccacatttttccagatatattggttagaatccacagactcacatattatttcacatttggtatgcattattcaagttaaaacttattttatggaatcttatggaatatatattccaattacagtttattgtatctaatcttttaagtatttaatattttctatctcctaataacaaagaataaattttacttaaaattatgatgaaagttaacattgttagtcctgaagaccattgttaacattgtgcagtcctgaagacctgcacctcaaagttagatcactgatatgtgcacacagaaatacacgtttagatgtaataaatatacaatgtgtgtccagtttttttcttactattttatcataagcattttttcatattattatagtctctctttaaacatttgtaatggttccataatatttcatcatatggatatactttggtttgcataatcatttgttgctttataatgaaacattcagagtatttctttttcatgattataagtaaagccattataagtattaatgtgtataatatttttctgtacttggaattattctttagtacaggtattctaaaactgatactttgggtcataagtgtgtaaattatgttaaattcctgtgatttttttttttttttttttttgcttgattgttgccccagggtgaaatgtaaattgacacaatccttctgaaagtctgtgtaggcaagtgctgagttccctcatcagtgtcaggtgcttttgcttttttcatcaccacgttttgaaacttttaacaattgagaattttaatggaaaaattattttcctacaagagacagtatctttaattgctttgctatcttttcttcataccctcatgatatatattatagtaatatctgtgtgctatatattatagtagtataataagctattatattacgtatttgtatatttatcttatttagcccactacttagtacagtgccatatgatgatgaaagaatggatgatgaaagcattttatagaccttgcaaatatatcatattgattaaatcatgtgctgtgtaactcattcagcaagtaggaagaattctgttgggatggaaaagaaacaaaattgccaacagcgatataaaattatctcacccgacttttggttacgtatagattagccgatgaattacatatgccatctctccctgaaatgatgtttggagacaacgttttaagaatccagcatgggtctggctttggaattgagttcaatgctacagatgcgttaagatgtgtaaacaactaccaaggaatgcttaaagtggcctgtgctgaagagtggcaagaaagcaggtgagaatccggtcaattaggttaaacaaaaaaggtaattaggttaaacaaaagagaaaagacttgaaaaaatattcagtaatgatacgtgtgtgttgttagaatgaagggctggtattattaaacttgagagttgtatcattctagaattcgtttttctcagacataaaaatggaagttaattaccccactgcttgaatacttgttaaagtgaattacaactgagctgagctatgtacgttttcgatttttcagtgttccttactgaagaggcagtaggctatacttaatgttcctgtttttaagaaaaaatgtttacttatgatatgcttaataaataccctatttgagaagcattgaaattaagacaacatgtttttctttgatagtcaaatcagcaattatttactttgtgcctaatatgtactaagtaccttagatgatacaaataagtataaacctttaaaccatgtcctcaggctgtatacagactaattgaaaagactacatcagtacatgacaagttaaataataaatgcagaaaaactgtaagaaaaaccttgtactggtgaattataacaagtgtatatatttaataggatatgttattatagaatataatttgatgtgatatataaatacagataatctctattctgcatcactgaatctgatccttctcattttggtatttgaggacggagggtgaacactccaaagaggttattaaaccatatgattggacctatacaacagattataagggaaccttacttggagaatctcttaagttaaaggtaaatcttacttttttctttcatgagtcattgattgtcttggacagtctgagcattagaactttctagtaacgggttattttttgcaactatttttatcgtccttgttttctgttgtggcattcctcagaacctaatgtgagggggttttgcttgttgacttatcagtagaaaataaaagacggcattagtggaaaaatttatttttaaaagtgtagttggtggcaacggcagacggccttgttgttatcattatcactatcaagaaacattaaaatgtgtttcgggccttggtaatgtattacatgatttagacagaacctgctagcttgtagctcacaagtttatagatgaacaaatatatgagcaaaaagaacttctggttagacaaagtaggtttatgccctgtctgccctgagtatgaacctgaaatgactttaggaagttacttaatttgagtctcagttttatcaataaattgggtaaacagaaatatctacctcaaagcagagttttgatgtgaaataatttatgggaagctctcaataaattctaaagctctatattagtattaagtcctgtgtgtgtaagccctgcttgagaagagattggggccaggcgcagtggctcacgcctgtaatcccagcactttgagaggccgaggcaggcagatcacgaggtcaggagctcgagactagcctgaccaacatggtgaaaccccttgtctattaaaaaaaaaaaattagctgggtgtggtggcgcacacctgtaataccagctactcaggaggctgagggaggagaattgcttgaacccgggaggtggaggttgcagtgggccaagatcgcgccactgcactccagcctgggtgacagagtgagactctgtctcaaaaaaaaaaaaaaagaagagattcggccaggtgcagtggctcacgcctgtaatcccagcactttgggaggccaaagtgggtggatcatgaagtcaggagttcaacaccagcctggtcaacatggtgaaaccccatctctactaaaaatacaaaatttagccaggcatggtggagcatgcctgtagtcccagctactcgggaggctgaggcaggagaattgcttgaacccgggaggcagaggttgcagtgagctgagatcacactactgcactccagcctgggcgacagagcgagactccgtctcaaaaaaaaaaaaaaaaaaaaaaaagagagagattcatggtaaataacgctaggaagatggaattggtaggtcttatattgtgaagttagctgcattttgaaatcttatagtatgactgaaaggaagcaaatctgggctgggctcaatggctcacgcctgtaatcccagcactttgcgaggccaaggagggcagattacttgaggtcaggagttcgagaccagcttggccaacatagtgagaccgcacctctactaaaaatgtaaaaattagccaggcctggtggcgtgtgtctgtaatcccagctacttgggaggttgaggcaggagaatcacttgaacccaggaggtggaggttgcagtgatccgagatcacgccactgcactctagcctgggcaacagagaaaggctctgtttcagaaaaacaataagtaaaataaaataaagcaaatttggtttaggttgaatgtctctaaatatcacagactattatatagaatgaatttatttcagcgtaacctgaaatatttatattaaaagtagctattggaaaccctatgtcatccgggcacagtggttcacacctgtaatcccagcactttgggaggccgaggcaggcagatcacctgaggttaggagctggagactggggaggctgaggcaggagaattgcttgaacccaggaggcagagttgcagtgagccaagatcacgccacagtgctccaacctgggcttcagagtgagactccatctcaaaacaaggaaacctgatatcatatgttggtgcttaggcagaaatgttaagaagatagtgttgtgtctgggccccttttctctgcagaaatttttagagtctcatgaagataaaagttcatagcaggaacttaatgattgttatcttcagtttctgctattattacagtccaagctttaactatttttctgtgcttccaggaaaaaactcattcattcattcaacagatatttcttgagctcttgctctatgccaggcactaatgctaggagccttggatacagcagagcagacaaaaattcctcctttacagtctaatgggagagcaaggttattttagtcccttatactacttcatagattagtgttctcctccctcctctcttctgattgaaaaactttgtagagaccatttaatatttcattgccaggagtgaggaaatgggaacttgttttaaacccatacaataatgatgatgacttactttgtggactgacttaggaaaagcctcctggaggttatgaagcagcattaggtgtgaccaagtgagaaccacagctgtacaaacaaggagtgtgagagtagtagaaggcaaaaagcatttgttcagtactctcctattgatacttcagcctataatgtgatttgttctgaggtgttgctgataaatgtcaatgtgattacccactcactggtggtaatgagctcaggctttggcaaaacacagatctgggttcaaaatcccagcaccatcatttgccagcttggaaaagtaatttagtcttacttagccttgtttcagtcactttgttaaactagggtaatactagttgtgaagtaggaaataaaattatgtatgtaggctgggtgtagtggctcatgcctgtagtcccagcactttgggaggctgagatggatcacttgagctcaggagttcaagaccagtctgggcaacatggtgaaaccccatctctacaaaaaatagaaaaattggcgggtctggtggcacgtgtctatagtcccagctactcaggaggctgaggtgggagaatcagttgagcccaggaaggcgaggctgcagtgagctgtgattgtgccactgtactccagcctgggtgacagagcgacaccctatctcaaaacagtgtgtgttttgcagtaagatctcaataaatggcagctgttactatgataatatagtatatcaagtattagggaacctaagttaatattgtaatacctagaataaaagtagatatattatctatggtatattattatattaaatagcagcccaaatggactaaggcctaataatttcaatcacctctggaatccctagtgtcttttatttcagttggttctgggttatgacatctaggcttctaatttgcctctttattttcatttcagttctaggatgatggtgttttccttcagagaggatttttgtttagttctgacaggcgctcgagaatattcatagtcaaggacagagctctgcaaacttcttctgtaaagagtcagacgtaaatattttaggctttgtgggccttagagtctctgttgcagcaactcagctgtgctatcatagtctaaatcactcatagacaatatataaatgaatgggcatggctatgctttaataaaactttatggacagtgaaatttgaatttcatgtaatttttatgtgtcatgaaatatttttcttttgattttttttctccaattatttagccattattagcttgcagcccataaaaataggtaacagggcagatgtgagctgcatgtcttagtttgcctgccttggtctaggaccagagtttgaggtgtactgggcctgcagataagaagctctgaggctgggcacagtggctcatacctgaatcccaatactttaggaggccgaggcaggcggaacacctgaggtcaggagttcgagaccagcctggccaacatggcaaaaccctgtatctactaaaaacacaaaaaaattagccaagcgttgtggcatgtgtgtgtaatcctcgctacttgggaggctgaggcacaagaattggttgaacccaggagctggaggttgcagtgaactgaaatggtgccactgcattccagcctgggcaacagagcgagactctgtctcaagaaaaaaaaaaaaaaaagttctgaaatcactatagctctttagggtgtcatctctgatttgggaggaagcaggaaattctccagggtccttgtccttagtgagcactgagcagtgatggcaccaaaagctagcagagcccagcttcttctctggatcagccagtgctatgcctcagggcaaaagccagccaagtacagacttacttttctcggctccagtctttccagatctcagcccagtaactccatactgccttggccatttgatgcttttaggaagtttttgggtttttttagccagctttttaaattgtcttcatcaagaaggtttgtctagattacttattctgccaatactgttccatatgttttttatttttttgagatagagtttcattcttgtcgcccaggctggagtgcaatggtgtgatctcagctcactgcaacctctgccccgcgggttcaagcgattctcctgcctcagcctcctgagtagctgggattacaggtgcctgccaccacgatcagctagtttttgtatttttagtagagatggggtttcaccatattggctaggctggtctcaaactcctgacctcaagtgatctggccgccttgcctcccaaagtgctgggattataggcataagccaccgcgcccagcccatatgttttatatttagctggttatttttttgttgttgtattttttagatccctgggttcagagagagatatgtggagttgaggaagagagctgaaaagtataaagttttagacatatttagccttgcaaatggagacaatagcataaataagttaaatatgatatctctaactcatgctttgttttttgactttgtctttcattttataagaacaagtacgtaaatggaaaaactgacagattcattttgaccaatcacttactgaaggcatatgtgaaacgttaatgaagcaatttactaatgagaaaattcagataatgattaattttgggggattcaggagtatctataaggaggatgttaaaaatgtgttcctttgaactaaaatcaaataaaaaggacgaaatttacaagtgtgtgtatttaacactaatttcagttgtgtaaccttaggcagtcctcgttggcagaccaacttttgtttaactagatcataaacttaatgtgtgatgcaggggactggttatatgccctgcccctacactccaactcccttcccctcccagttttcacctcaagagtggccttatacctgctccgtacacagttggaagtaaaactgcttagggctaagtgttatctctaagtgaccatggaagaattatggacatttttttacctcctggaaatcatatacaaactgccactttcttttcatggcatcttttccccctacattacttaacgttcccttagatttcctcccaaaatctgtgcagtcttgtaaacaacatcctttgtaattttcttctgattcttatctagttatctcaaattactctccatctgctaattttgtccatgagtcaaaacaaatcacctaatcatgacgcttaagtaaagctacatttactaaatatctatggtttgacaagcattgttgtgtttgtttatggtaaacctgtcaaggagtaaaacagctgagcattttgtagtgaaattagatgtggtagaaaatagtatcacaattcatacttgggtgctgctcaggagacacttgagtttaatgagctcctgatatgatctgccttgggactgttgatgcttttgttggattacgtgtgtgcatgtcttagagctacaaaataataccttgaaaaattgccaacttcattcaaagctctttgcaatgctaagagtttccctcagaatttctctacaagttcttgtttacctcattatttaaagcactttattttgttgtaggttttggggagttaggttgagcaaatatctaacattctaatggaaaaatattttttaagttccatatgaatgtcctaaaagtggctttcacagcacaaatgttctatgaccttctatgatagcagtcgttcatcacactgactgatgtttagttgattaattttctcatagtcacaacagaagttgattttaatatgacttgcatgaaaaatgataaatttttactgctttttttgtgaagctataatattgggcatctgtaatgtcttcagttttcagaatcaagccatattctgatcttttatatctactaatgacacccaaatttagaactgtgtgctctggctatgtagaaaagactgattgaaaaagaaaagaaaagactgctttcctgtgtctctgtagctcctcaactttttttttaatgtgctcctctttaaaattttttctttcaggttgtacctacaacagatcatatagatacagaaaaattgaaagccagagaacagattaagttttttgaagaagttctcctttttgaggatgaacttcatgatcatggagtttcaagcctgagtgtgaagattgtgagtattatttttatttaaaattaatatttttcttgcattcttaacatcagacaaaaatatgactcactttgaataacactgagcctggccgggcgcggtggctcacgcctgtaatcccagcactttgagaggctgaggcgggctggatcgccaggtcaggagaccgagaccatcctggctaacacagtgaaaccccgtctctactaaaaacacaaaaagttagctgggcatggtggcgggcgcctgtagtcccagctactcgggaggctgaggcaggagagtagcgtgaacccaagaggcggagcttgcagtgagccaggatcacgccactgcactccagcctgggcgacagagcaaaaaaaaaaaaaaaaaaaaaagaataacactgagctttaacatgatgtcatgtacaatttcacttgaatctagagtgtatcttattgaatatccattataaaattcacaaaatatttgtgtattcttaaggctttattttagcaaagcatttttaatagacctgcctggccaccttgtagtttatttgtttattatttaactctaatgaagactgtggcttaattttcacattttggattaaaaatgatgttgataggatctgcagacggcaaggtggatgtcattttttaaaatgatccatgtgttatgatttcagtgcatcattcaactaccacttcaattttcagcctggtggcgggcacctgtagtcccagctactcgggaggctgaggcaggagaagcgtgaacccgggaggcggagcttgcagtgagctgagatcgcaccactgcactccagccctccagcctgggcgacagagcaagactccgtctcaaaaaaaaaaaataaaataaaataaaagaagtagaaaacacacataacaagtatggttattcatatttctttaccactgcattataattgggtctctaatactttccagaaataactcaactgaaactttttactaaatgcctcattctttaagacccaaagacccagctaaaataccaccttttctacaaggcccttcacaactccgttacacagagttaaatatctcttttctatactcctttttaaaaacctctcaattaggccgggcgcggtggcccatgcctgtaatcccagcactttgggaggccgaggcgggcggatcacgaggtcaggagatcgagaccatggtgaaaccccgtctctactaaaaatacaaaaaattagctgggcgcagtggcgggcgcctgtagtcccagctacccgggaggctgaggcaggagaatggcgtgaacccggaaggcagagcttgcagtgagccgagatcgtgccactgcactccagcctgggcaacaagcgagactccgtctcaaaacaaacaaacaaacaaacaaaacaaacaaaaaacctctcaattatagcatttgtcatgagatctgtcaaagacagagaccctaacatcaaacattgttcttggggcataatgattgtggatgctgtgatttaaagaatgaaaataatacaaaagcagcaacagatttgttttaaagtcaaattttagctacttgggaggcagaagcaggaggattgcttgagcccaggaggtcaaggctacagtgagctatgatggtgccactgcaccccagcttgggagacaaaataattttatttttagataaataaaaaattttatttttcttatctaaaaataaaattagttttttcggtggaatcaaaggattttgaaattgtagtgaatttttagagaatcattttttgtagcctccatattttatagataaggcctaaaaagatagcttaaggtcatgaaactaattgcaaagttttctttgtatcatctaatatatatcattattctagcattagatagttgttttcataggctttacttctttgctcacttataactctaaattcacttttttttgtttagatttattctctcttcagttcacctagtcttgtatctttccacttgtctaccacctgttgaattgactatgctaaatgttcattatgagtttgcatacctgggtgtgcatttgtatccaagggggtatatatatcatgtctataagtgggtcggtatttggaaagcacatgtggttttgtggatggagttgcttgaaaggatatgtgtataaatatgtgtgtacaagaatacatagtaagtcttaaactgaagagcatttttttaaccaactactttaagctgaagtattagttcatagatattactatcctgtagtgaaatttgtagatgatttaatccacctactttgcagcaatcaacatattttaactataaaattaaaggaaattggtttagaataaaatatattttaatacttaaatgcataatatgactgcaccaaagacataatgaagcagtcaggtacttatatttgcatattgagtcaccgtaaatgtgacagcaaaaaatgtaggctgacagagatgtaaggtatcaatcagtgactcttaacacaattttccaaaatgatgaacaactcttagtgaagttctaaataagaaaaagtataatctttccttgatttggaaaatagttgacttcctggataattgagtgattttttttttattatctatgtaaaatggaaatagtttctaaagtcagatcattataagtaggctttttcacctctgtgaatgcctggtaagatactgcaagttttgtggaatgcaggactggactttgttgtataggattgtcctgtgcatcccagatctgtcgttctggtccttattcactaactgttgatattggttgcttattgatgtgacaagaaaaagtactctcacaaattcccaaacgtcccctaggaaagaactactgccctaaaatatgctattgtattggcactagagttctggtctcctaattcctactctctccactgtgccatgctaaaatgatatttcagtttactgcctgtgttgtgtccagtgtgactgttggtaactaattttgaaatttgaagaaatgttgcaagtcagtttttccataaattacacatatcactgtgtagtaatgtcaaataataatgatgtgcttctcaatttgttgtgacatcaagttgtcataagtcaggttatttctacagctttcctttactaaaagtcttttttttaagtctgttgctgataaccccatcagaatacactttggctcagagccttttctccagcaaaggtattaataccttctagcttcagttttatccggaaaatggttaatgagcacctgctgtgtgctaggtacttttctaagcaatagagatgtggtgatgaacaaagcagatatttccaccaccatggagcctacagtcaagtggaaacataaatgaagatagttacaaatccgttaattcgtaatggagtgctatgagagagaataccaagataaatctattgtggtatggaatggtaagaaaggcccctctgtggaagtgacatgtgtactgaaatctgaaggacaagtgaacattagccgggagaatactccaggtaagggaagagggtgtgtaatggtcccaaggcagaaaagaatttggcctgtggctggtgactctccaggcagttaagtcactgtcattactgggttatcctgttatttcttctttcatcattaatgtagccctgtgcttatatgtaagattataggcagttccctgaatatatgttattatttcatgtctcagtactttttgtacatgcaggtcccctttctgaaattctccttcccatctctagctgttctttctgtggtcagctcaagccttgtcttatctgatgttcttcagcagacttaggtacttctttctcaaatgcttattgagccttgtgcatacccattatagcagctaccacatctgtttgacctttccctggctgataacctttttgagcattgggattctattttttcatttatataaatccaagacttactatagtaagaacttggtgttagtagacaataggtatttattcagcaaatggccaagcatattcattttaattaattaattaattttgggacagggtcttgctctgttgcccaggctggagtgcagtgttacaatcatggctcactgcagcctatctcccaggcccaagccatcctcccagcttagccttccacgtagctaggactacaggcttgtgccaccgtgctttgctaattttttgtattttttgtagagatggggtctgactctgttgcccaggctggtcttgaactcctgggctcaagtgatctttccacctcaaccttccaaactgctgtgattataggtgtgagccaccatgccagctaaacatattcattttaaagacccaaatacctcacattccattcaaccgctctctccccgccaccaggacccaccttcatactttctccactgattctgcctatcattagtagttatacttggaaagcagaggaatttgtagatgtgccacagatgaaagatgttaagaatgtgttatagtgttctgataaaccaggtctttagcaatatgtaatagtgcctacaggttgcactgaattagagcattctgtgtaaggtctgttgctttgttttatgtaaagtgaataggtgagtagtgacaaagaactaggttgttctttcattttggttttattggtgttgacatttactatcagtacctgccattttttgaaataaacattataatttttacattacttgggtatgtttttaagtcttttaaacctcaatatctcctcacctagaaaaaatattttaggaaaccgaaactatgatgttaaatagtttgcacaaggttttgaggctagttggagctaggacaaagagcttctagttgagagatttttataaactgtgaattcagccttattccagggtttttttgttttttgttttcaaattttttctttcagcaaagtaataaaatgtttaatttttattaaaatattaatgtacctttttttttttttccagagagtaatgccttctagctttttcctgctgttgcggtttttcttgagaattgatggggtgcttatcagaatgaatgacacgagactttaccatgaggtatttattgttgtttaatgaatatactaattgatactgggcttgtttgtgttgtttaattgtcaatctgagaatttgaaattaaacaatctatattatatggcagtctttctaactgttaagtctgagtgtttcacattcactgttgactgcaggctatcatcaaaacattacatttccttttacaaaggttctggtgactcaaaatgttttctaaaagacactccctaattggggaggggtcttttgagacaattttgtatgtacttaatccatgtttaagaaaactgtcctttaactcttacctttgtttacagtatatgttgtttatgtaatgtcctgatgtacattaatatacaggaagtacattaatatattaatcaggccaaggccgggcgccgtagctcacgcctgtaatcccggcactttgggaggccgaggtgggtagatcacctgagatcaggagttcgagaccagcctggccaacatggtgaaaccctgtctctactaaaaatacaaaaaattagccaggcatggtggcacggacttgtagtcctagctgctacttgggaggctgaggtgggaggattgcttgagctggtgaaggttgaggctgcagtgacagagcaagaccctgtctcaaagaaaaaaaaaaaaagaaacatacctaagttatacagttagtaggtggcagaattggaatttgaacctagtaggataggattggattgatgctttctaaacccttcacttagggattttttcttgaaataacatggttatagtgatagaccttttttcttttaaaagtggtggcaaagtactaaacataagctatatttttgttccccagaaagagaaatctaaattttatttttatttatttatttgagatggatggagtcttgctctgttgcccaggctggaatgcagtggcgcgatcttggctcactgcaacctctgcttcctgagttcaagcaattctcatgtctcagcctccctagtagctgggattacaggcgcccaccaccacgcctggcaatttttttgttgttgtttttaatggagtgatggggtttcaccatgttggccaggcctgtcttgaactcctgacctcaagtgatccaattgcctcggcctcccaaagtgctgggattataggcgtgagccacaccgctcctggcctaaatgttaaaaatactgttttaattaaacaatattgaattttaggaatttatcctaaaaagattcttttatgtaataatctactaatattaattgggcaattactcagagttatacgtacatgaatattcacagtagtattgtttataatagcagaaaggaaggaaagtaggaacttaatgcccattaaatggccattaattaaattgtttatatccatatggtataaaatatataattattaaaattggttgcagagattgatatttaagtaattttgaaagatattcatttcagtgttgaactttcaaaagcaagtatgaatctacttacataagattctctgtagagatttctaagtattaaagatagtgttacctataagctgtgatcactgatgatttatacttttatattatttgatttttttcctacagtgactattaatctgtttttattaatacaagagagtgaaaccttaaaggcgtataattttgtggcttttcttttattgaaaagtgtttcaagaagtaaattataataagttgctgttctaaaacctaaccaaaaatcttaaatgggaaaaattgaagtacaaaaaaggtgattttaagtaagctatttggtaagagctttatggaatgggaaagaataaaaattttaaagcatgttttgcaacataaaagtagcacaattacgtaggtaaatgataagatagcttaagggaaagatgtttcaaacttgaagtaattttaaaatctcttgcatatttcatttatacaaattcattatatacattattcatttatatacatattctttcaaagtaaaatctttgctatgtttctcttacatggtaattataaaatctgtttacatatgtgtatcatcattataatgtatagaaattggaaataataatccaatttgagttaaataggagttatctcagtgtagaacaagatgttctctttagactgcatgctgttttgacaacctatcctaaaatgtaggcagtctgtttttaatacaaaggattttgtaaatcagtataattaaatttattgcaactgtttatttttaaatacaggctgacaagacctacatgttacgagaatatacgtcacgagaaagcaaaatttctagtttgatggcaagtacttaaatttcagtttttagaagttaattttaatgtttcattttaatttaagtagcatatacccctgaccccaaccacccaagtttacatccctaaacccattcattcacctaatggggctctataggataaattctatgggagcataacttttctgaccttacctcaaatacaagaacatttagagctgctaggtacttaagcctcatctaatctaattttcacattttgttctagagaaattgaaacccagaggtgtgacttactctgagtcacatagctggctggtgatggatgttctttacacttaccaccctgccgccttatttctttctacatagtctccttttctcttccgaaaatgtggtgattctgtaccataatttgtttgttttggcatcatttttctttattttttactcccctgggacctgtgaagccttccttagaacttaggattctataatgggttgcttaaaaattggtaccttcctataaacttgattttattttttcacgcttagtatgtacttctgtctgggtatagagtatacttggaacagaaaagttactacttagattctattgtagactacatgctgtgctctaaccgaagactagtgttttcaagttacaaaagcaggagatacatagggttggattaagatgtattaaattcttaggacatttgtgggaacattatagattatataaccctgtgatctttgatgaaatcattcagtaacaaagttgaatgattccgtatcaagaaatacctattatttttaggagcacatatgcatatattgcacctgattttaaaatttccatgctttatgaatgcttgaaccaaaacatttgtaaaaaatttcagtacagtaactgaatatgctaatatgatttatgtatttcctagcatgttccaccttccctcttcacggaacctaatgaaatatcccagtatttaccaataaaggaagcagtttgtgagaagctaatatttccagaaagaattgatcctaacccagcagactcacaaaaaagtacacaagtggaataaaatgtgatacaacatatactcactatggaatctgactggacaccttggctatttgtaaggggttatttttattatgagaattaattgccttgtttatgtacagattttctgtagccttaaaggaaaaaaaaataaagatcgttacaggcaggtttcactcaactgctgtttgtactgtctgtcttcacattcatattccagatttatattttctggagttaaatttggatgatttctaaattatcacaaagtgggacctcagcagtagtgatgtgtgtgtctcatgagcagtgagcacagtctgcattcatcatgaaacactatcttctaccaggaggaggttaatgtaaatcaccaaatcccaatgccttgtgactttcataggattcctgatcatgcatgttgatgtactggctcttcactttgggctttctgatgtttattcacacctttggagagttgcaacttgccacatacgaaattagtctcatagtgtagtgaacttcaaccccaaaattttaaaaatgtatttccccccagttttaaattgcctttgaaatttaaaaaaaaaaaatttagacttagtaccagaaccaaaaatacctagatttttggagaacttattacatacatagaaacatgaatatggtttaccactgtgtgtgtgtaggatgttagaattatctgtcctccatctttaggtgctttttcttaaatgtggttctacttatactgatatttttaatttccatcttccatgcaacctcagagtgaataaaccccttaaatttggtgctggttcgaaaaagtctaaagggtttattaggggttgtttttcgcaaatattacatcaatccttaaagcaacaagattaattttctgcttaaaatatttgggaagataggtaaggaggagggggttttaaaatataaaagcaagtttttctattttaaggtgcatatttgtaacattacaggggatgaagtaaaatgtaattaattagcacaagacttagggagtacagaaaatacacagaagtaaatttcaaatccatttgattgttttcatagtgaccccttagtcattttatattcttgtctgcctttctagaaaaatggttgtcataaagtggaaagtgattaaaaagcatcaaataagaaattatttcaagtggatttttaaaaatatttttttgaagggcagggggaaaattcaccccttttctgatttgaaatatgttgtacatatttccatttgatggataaatcattaagtaagaatatttgatttaaagtattagccaacctcttcaggtattagcctgaagataaattttaacaaaacatatacacttgggtatccgtcattgctcaaactctatagtgtattgctggagccaataggcagggtatattttattagctaaatttgatatttgtcttctgccttctgtatcacctccaagctataggaaatcaggattttgttggctttaagaaaacacatggtatgttcactgtatattaaatatacctgtatttaatgttttctcttaggacagaaaagtagacacacacacacacacacacatgttgtgttcagctttctgttttatattatttgccattgagattagaatagaacaggctctattcatgcaaactatatgaaatgaaaaacttttaagactcttcattaattggagcttctgggcaacatcgtgtgtgtgtgtgtgtgtgtgtgtgtgtgtgtgtatacagacattttttttttaacttgttgattcagatgtcttggtccctgaatagtcctagattacttattttgagaattcattgttaaaaattacagggaattaaaataattgccttttttttttttagagggtaagagatgggtagaagagtatgcctctgaaaattttattagtttattcttgtggagaataccaagaaaatgtgtatttgcccattgctaaatatgatatatgccattttgtatttatttgtcccaagtgtctttttgtaagaggagaataaacaataaggaattactgatcaaagttttactatttcatttatttgagtttttcttagagcttaattaaagaagtgtggtttggggtatacttttcttatttgtgctttatgttttgaactcagtcaacactgtagacagtctccaggcaggttataaattaaaacctaactgatggttcagaatacaatttcccagtttgcatttgggctcttgcctctcctctccctctgttcatcaatatttccatggatgttttttaacagtattttctgtatgttgggttaatgtttttggtttttgaaaatatgaatacctgtcgtatgtattagttttgagtactatatgtacaattatggtgctaggtataatagattacaacaatgaagcgatgtagtatatgtttttataggattaaagtctaatggaggagacaaagtaaaaaaattactaattttaatatgtgcagtgatggaaatgatactgacaagagagtaacagaaaatcaactaactttagtagaggtagtcagagctctgcttctcaagaagatgtggaaaacctcaagagactgtcattcccattttaacaaggagaaaaggctgggtcatctataaaattaaagctttttttcttgaacatatcaaagaactgaaattacaaggcaaacaaaccaaatcccaaagagtgataagccctacaaggagagatgggacatactgactgtttaaccttaggaagaacccaagagaaagagatggcctttatataaacaggtaaaatattggcaaaaattttaagaaattcctaaagtgtacatgtgggctagcataccagtttggaatagccaagaatctgaaataagggaacttcatacacactcacaagttctttcccaagggcctacaccaggacttaagaaagactggaagcagggtgtggaaccagaaagtctcagtaggtggtttaagcaaacagaaggtagttggctgccatgaaattctgcctgctttcaagctcttctcttgaatgatgcaaaagccttaggctattgtagggaggaacaacaatcattcctagggcccaggcagaaattcattgctctggggtaggaatgtagacaaaacccatctgcttttgagagagaggtaggaaatgttctgccttcaggacacaggaaaacaatattactgctggaagagtagaagcaaaaattgaccttggaggataggcagaaaatctgggcccaggaagccacatggataacataaagaggtctgctcccagtggggaatgagcatgaaattgttgcacaagaccaacaatagatttgaaacagattttgactactattgagaaatggtgcaggaatgttgagaaagccacatccctgaaggccaggcacacaaagcctgcctaagaccgaggctagccaaggacaaaaaaccccctgtctctgctataagcctagcactaagtaacaaggaaaaccagtctgttgaggaagcagcaagggtgtaaatatagatcctctctgtggtgtaggcatacagggatccctgaaaattgagggtgggactcagaaaagtcctcctgtactccaggtgcactgtaagcataaggtaacagcagtcaaccactggaagaatttgaagcctgtagtatactgaagatagtgacagcattaatccaacccaaacccctaaaaactggtgtctacattgacacaatttccaaactaatggtctctgtgttagtccattttgcattgctacaaaggaatacctgaggctggataatttatagacaagaggtttattttggctcatggttctgcagattatacaagaaacatggtgccagcatttgcttctggttaggcctcaggaagcttttacttgcggcagaaggaaaggggagctgatgtgtcacatgacaagagcaggagcaagagagatgccaagttctttttatttatttatctattttatttatttatttatttactgagatagcatctcagcctgtcgcccaggctggagtgcagtggcaccatctcagctcactgcagcctctgcctcctgggttcaaacgattctcctgcctcagcctcctgagtagctgggattacaggcatgcgccaccaagcccagctaatttttgtatttttagtagagatggggtttcaccatgttggccaggctggtctcgaatgcctaacctcaagtgatccacccacctcggcctcccaaagtgctgggattataggcatgagccaccgtgcctggcccaagctctttttaaaaaaccagctttcacgtgaactaatgaagaactcattaccccaaagagggcactaatctgctcatgagggatccctcccatgacccaaacacctcttaccaggccctgcttccaacattgagaatcacatttcaacatgagatttggaagggacagacatccaaactatatcagtttgacagaagtgtgtgcatttccaggtgtaacacaatctaccttattccttctgttatacacatgagtctggcattcaatcaaaaaccaacaaaatccaattcagaaatgaaacagaggttgggactagcagaccttaagacaatcagttaatatattaacatatctggtggaaaaggtgggaaataacaaacagatagtgaatttcagcagagaagtgggtaaaaaagggcaaaatggaaacaccagatatatacacataaaaagcttggccaggcactgtggttcacacctgtaagcccagcactttgggaggccgaggcaggtagatcacttgagaccaggagtttgagaccagcctgtctaacatggggaaaccccagctctactagaaatacaaaaaattagccaggcgtggtagcacatacctataatcccagctactcgggaggctgaggcatgagaattgcttgaactcgggaggcagaggttgcagtgagctgagatcgtgccactgcactcctgcctgggcaacagagcaagactctgtgtcaaaaaaaaaaaaaagtctacaatatcagagatagcggatttcttcaaacttgatacagctgaagaattcatgaacttgaaaagaggtcaatagcaagtatctaaacagacaaagcaaaagagagtagtggtggggaaacaggacagagcatccaagaactgtggagcaagatcaaatagtctgatgtacaggcaaaccttgaaaatattacagtgtggctccagaccactgccataaaacaaataaagcaagtcacatgaatttttttgttaacgagtgcatatgaaagttatgtttacactgtaccatagtctattaagtgtgcaatagcattatgtctaaagaaaaacaacatacgtatcttaatttaaaaatgctttattaaaacaaaatgctaataatcatctgacccttcagcaagtagcagtatttttgctggtagaggaccttgctttgagttgatggctgctgactgatgatggctgtggcaatttcttaaaataagacatcaacggccaggtgtggtggctcacacctgcaatcccagcattttgggaggccgaggtgggcggatcacctgaggttgggagttcaagaccagcctgaccaacatggagaaaccctgtctctactaaaaatacaaaattagctgggtatggtggcacatgcctgtaatccccgctactcgggagactgaggcaggagaatcatgtgaacctgggaggcggaggttgcggtgagcagagatcacaccattgcactccagtctgggcaacaggagtgaaactccatctcaaaaaaaaaaaaaaaaaaaagacattcaaccctcttagatcctgccactactttatcagctaagtaactaagtatatgtaatattctaatcctttgttgccatttcaacaatgcttacggtatcttcaacagtagattccatctcaagaaaccactttctttgttcatccataagaagcaactcctcatcctgttaaagttttgtcatgaatttgcaataattctgtcacacctttaggctctgcttctaattctagttctcttgctatttccaccccatctgcagtgacttcctccactgaagtcctgaacctctcaaagtcatccacaagggttggaatcaacttcttccaaactcctgttaaaatgttgacattttgacctccttccatgaatcacaaattggcatctggaatggttaatcctttccagaaagttttcaattgactttgcctggttccatgagaggaatcactatctatggcagctatagccttatgaaatgtatttcttaagaaataagacttgaaagttgaaatgactctttgatccatgggctgcagattgtatattgtgtcagcaggcatgaaaacacagcattcatctccttgtacatctctatcacagctcttggttgaccaggtacattgtcaatgagcagtgatattttgaaaagaatctttttttctgaacagtaggtctcaatactgggcttaaaatatttagtgagcgaggctgtaaagagatgtgctgttatccaggctttgttgtagagcacaggtggtagcaactgatcataattctcagctctaggattttgagaatggtaaatgaaactttctcagtatcagcagtaaggctgttttgctttattatcatttatgtattcactggagtagcacttttcatttccttcaagagcttttcctttgcattcacaacctggctaactcgtacaagatgtctggctttcatcctatcatgccttccttactaagcttaatcatttctagcctttgatttaaagtgaaagacatgggactcttcctttcacttgaacacttagaggtcattgtaggttatttttttttttaagcatggaaataaatttttttattactgaattatttcccttatttgactttcataaggaaatactcaaaaaccacttcaaaataactcaattctcactcatacacatagcattttcaggacaccatattttcttttttattattttattttattttattttattttatttatttttttattgatcattcttgggtgtttctcgcagagagggatttggcagggtcataggacaatagtggagggaaggtcagcagataaacaagtgaacaaaggtctctggttttcctaggcagaggaccctgcggccttccgcagtgtttgtgtccctgggtagttgagattagggagtggtgatgactcttaatgagcatgctgccttcaagcatctgtttaacaaagcacatcttgcaccgcccttaatccatttaaccctgagtggacacagcacatgtttcagagagcactgggttgggggtaaggtcatagatcaacagcatcccaaggcagaagaatttttcttagtacagaacaaaatggagtctcctatgtctacttctttctacacagccacagcaacaatctgatttctctatcttttccccgcatttcccccttttctattagacaaaactgccatcgtcatcatggcccgttctcaatgagctgttgggtacacctcccagacggggtggcggccgggcagaggggctcctcacttcccagaaggggcagccgggcagaggcgccccccacctcccggacggggcggctggctgggtgggggctgccccccacctcccggatggggcagctgccgggcagagacgctcctcacttcccagacgggcggctgccgggcggaggggctcctcacttctcagatggggcggctgccgggcggaggggctcctcacttctcagacggggcggctgccgggcggaggggctcctcacttctcagacggggcggctgcccggcggaggggctcctcacatcccagacagggtcgtcgccgggcagaggtgctcctcacatcccagacggggcggcggggcagaggcgctccccacatctcagacgatgggcggctgggcagagacgctcctcacttcctagacgagatggcggccaggaagaggcgctcctcacttcccagactgggcagccgggcagaggggctcctcacaccccagacgatgggtggccaggcagagatgctcttcacttcccagatggggtggcggccaggcagaggctgcaatctcggcactttgggaggccaaggcaggcggctgagaggtggaggttgtagcgagccgagatcacgccactgcactccagcctgggcaacattgagcactgagtgaacgagactccgtctgcaatcccggcacctcgggaggccgaggctggcagatcactcgtggttaggagctggagaccagcccggccaacacagcgaaaccccgtctccaccaaaaaaatacgaaaaccagtcaggcgtggcggcgcgcgcctgcaatggcaggcactcggcaggctgaggcaggagaatcaggcagggaggttgcagtgagcggagatggcggcagtacagtccagcttcggctcggcatcagagggagaccgtggaaagagagggagagggagaccgtggggagagggagagggagagggagagggagagccattgtaggttattaactggcctaatttcaatattgttgtgtctcagggaacagaaaggcctgaggagagggagagagatgggacaatggaaggtcaatggaccagtcacagcacacactacatttatcgattaagctcattgtcttatataggcagaattgttgatatcccccaacagttaacaatagtaacatcaaggatcactcatcacagatcaccatacagatataatcaatgcaatatctgtgaagcacaataaaccaaagtacaaaaaaagacatacacccatatgtaattaaagtccaagagaaaacagaaatggactgcgggataagaaatatcagtagaggccgggcgcggtggctcacgcctgtaatcccagcactttgggaggccgaggcgggcggatcacgaggtcaagagatcaagaccatcctggccaacatggtgaaaccccgtctctactaaaaatacaaaaattagccaggcgtggtggcacgcacctgtagtcccagctactcgggagcctgaggcaggagaattgcttgaatccgggaggcagaggttgcagtgagccgagattgcaccactgcactccagcctgccaatagagtgagactccatctcaaaaaaaaataataataataaaataaaaagaaagaaaaaaatgtatcagtagagataatggccaagaattttccaaagttaatgaagaacagtaactcacaggtcccagaattccagaaattccacattgtaagtcaaactgctgaaaccaaagataagagttaatctctcaaagacagttggaggaaaaagaaacattatatacagagaaagaaacacataagaattatagccaacttctggtcagggagtaaatgagcaagaaaataatgaagcgaaggtccatgtaaggagcttggaagtcatcattccatcttgacaataaggaaaatgctggacaaagtgaagacacaactcttcttggatccctcagaaaagtgacgttacagggcaaaatgctactcccaaaattgaagagacaggcaaatacagagaattacaacttaatggagcaggaactcagaagcaaaaacctccgtgggcactagtgccagggtaggaaaatctaaattgtgcttgacaaatagctggaggctcagtgtggacaagtttgagattaaaaactccaagggggccagatgtggtggctcatgtctgtaatcccagcactttggagcccaagacaggcagatcacctgaattcaggagttcgaaaccagcctggccaacatggcaaaaccccatctttactaaaaatacaaaaattagccaggtgtggtagcatgcgcctgtaatttcagctacttgggagactaaggcatgagaatcacttgaacccaggaggcagaggttgcagtgagccaaggtcacaccattgcactccagcctgggcaacagagtgagactccatctcaaaaaataaaataaaacaaataaataaaaactccagggggacccagtcatagggcaaccgccacacttctctgagttttacctccaggcactcaatcaggttctcacagtaaagactggccaaaaatccctttgggatttcatcaggggaaggggacaaagaaccattttcaaatatgccagagctttctcttgttaacaaggcctgcccttgagagaaactgttttactagagcctaatctagtaaagttttttcagagtcttactgattgggggaagagaaatatccaactccagtcagctctagctatcctgttccacccaatggtggggagggaggtacggagaagcacttgtgaagttcacagtccagaggcacaggctcattaaaagactgagactgaatcctattcgacctttgaactcacaaagactttcttcttcctcttttgctgatgttgtttacaggcactcagaatggtccagcatttgatataccatcgtaggctttcctacaatatagcctctaacaaaactaggctgtcccaaaccccaggtaatagaattgtttacttttataccaagaaggttgggaaagcaccaaaatctgcatgtggcatgtgcccaggcagactttgaggggttcgtgctgtgagacctaaagttcttatgaaattgtccaaaacaaaaaaacatgtcagcagggaatatggtggttccatttgtgctaaatgtgttcatgacaggatcaagcatgctttccttatcgaggagcagaaaattgttgtgaaagtgttgaaggcacaagcacagagtcaaaaagctaaataaaaaatgaaacttttgctgggagtggtggctcacacctgtaatcccagcactttgggaggccgaggcgggcagatcatgaggtcaggagttcgagaccagcctgaccaacatggtgaaaccctgtctctactaaaaatacaaaaattagctgggcatggtggcatgcacctgtaatctccgctacttgggaggctgaggcaggagaatcgcttgaacacgggaggtagaggttgcaatgagccctgcattccagcctggacgacagagcgagactccttctcaaaaaaaaaaaaggaaagaaagaaacttttttgagcaataaaaatgaaaagactttaaaaaaagactgagacctaatcataggactataaaatacctttccttcccacacatcttcccacacattactaaaggcctttttactatagccccttttacgtacatcacgttcaggtatcaagaaaaaaaactacaaggcagactaaaaggcaaaacagaacaaaaactccacagttttaagagacagagcaatcctcagaaccagattcatatatgacagggatgttgaaatggtcagaccatgtacttaaaacaactgattcatatgctaaagactctagtgaataaagtagacagcctgcaagaacagatgggcaatgggtgaacagagagatggaaattctaagcataaacataatgccagaaataaaaacactgcagcagaaatgaagaatgcttttgatgggtctattaatagattggacatggctgagaaaacaatctctgaacttgagtgtatctcaatagaaacttccaaaatggaagagcaaaaagaaaaaaaagattgaaaaaaaaaaatcccaacagaaaatccaagaatgatgggacaactagaataagtattacataagtggaatgaaaatatcacaagggctaggcacagtggctcacacctgtaatcccagcactttgggaggctgaggtgggtggatcacctgatgtcaggagttcgagaccagcctggccaacatggtgaaaccctgtctttaataaaaatacaaaaattagccaggtgtggtggcgggtgcctgtaatctcagcta

SEQ ID NO: 1096 - DNA, 3020 bp, Homo sapiens
gcagggggcggggccgggcatggtaacggctcggaagcctaggaggctgggccggagggaggcggaggaaccggtgttcgccgccgccgctgcttcagcttattccttgtggcctctgcgggtcctgcctcagccatgatgatccacggcttccagagcagccaccgggatttctgcttcgggccctggaagctgacggcgtccaagacccacatcatgaagtcggcggatgtggagaaattagccgatgaattacatatgccatctctccctgaaatgatgtttggagacaacgttttaagaatccagcatgggtctggctttggaattgagttcaatgctacagatgcgttaagatgtgtaaacaactaccaaggaatgcttaaagtggcctgtgctgaagagtggcaagaaagcaggacggagggtgaacactccaaagaggttattaaaccatatgattggacctatacaacagattataagggaaccttacttggagaatctcttaagttaaaggttgtacctacaacagatcatatagatacagaaaaattgaaagccagagaacagattaagttttttgaagaagttctcctttttgaggatgaacttcatgatcatggagtttcaagcctgagtgtgaagattagagtaatgccttctagctttttcctgctgttgcggtttttcttgagaattgatggggtgcttatcagaatgaatgacacgagactttaccatgaggctgacaagacctacatgttacgagaatatacgtcacgagaaagcaaaatttctagtttgatggcaacatgttccaccttccctcttcacggaacctaatgaaatatcccagtatttaccaataaaggaagcagtttgtgagaagctaatatttccagaaagaattgatcctaacccagcagactcacaaaaaagtacacaagtggaataaaatgtgatacaacatatactcactatggaatctgactggacaccttggctatttgtaaggggttatttttattatgagaattaattgccttgtttatgtacagattttctgtagccttaaaggaaaaaaaaataaagatcgttacaggcaggtttcactcaactgctgtttgtactgtctgtcttcacattcatattccagatttatattttctggagttaaatttggatgatttctaaattatcacaaagtgggacctcagcagtagtgatgtgtgtgtctcatgagcagtgagcacagtctgcattcatcatgaaacactatcttctaccaggaggaggttaatgtaaatcaccaaatcccaatgccttgtgactttcataggattcctgatcatgcatgttgatgtactggctcttcactttgggctttctgatgtttattcacacctttggagagttgcaacttgccacatacgaaattagtctcatagtgtagtgaacttcaaccccaaaattttaaaaatgtatttccccccagttttaaattgcctttgaaatttaaaaaaaaaaaatttagacttagtaccagaaccaaaaatacctagatttttggagaacttattacatacatagaaacatgaatatggtttaccactgtgtgtgtgtaggatgttagaattatctgtcctccatctttaggtgctttttcttaaatgtggttctacttatactgatatttttaatttccatcttccatgcaacctcagagtgaataaaccccttaaatttggtgctggttcgaaaaagtctaaagggtttattaggggttgtttttcgcaaatattacatcaatccttaaagcaacaagattaattttctgcttaaaatatttgggaagataggtaaggaggagggggttttaaaatataaaagcaagtttttctattttaaggtgcatatttgtaacattacaggggatgaagtaaaatgtaattaattagcacaagacttagggagtacagaaaatacacagaagtaaatttcaaatccatttgattgttttcatagtgaccccttagtcattttatattcttgtctgcctttctagaaaaatggttgtcataaagtggaaagtgattaaaaagcatcaaataagaaattatttcaagtggatttttaaaaatatttttttgaagggcagggggaaaattcaccccttttctgatttgaaatatgttgtacatatttccatttgatggataaatcattaagtaagaatatttgatttaaagtattagccaacctcttcaggtattagcctgaagataaattttaacaaaacatatacacttgggtatccgtcattgctcaaactctatagtgtattgctggagccaataggcagggtatattttattagctaaatttgatatttgtcttctgccttctgtatcacctccaagctataggaaatcaggattttgttggctttaagaaaacacatggtatgttcactgtatattaaatatacctgtatttaatgttttctcttaggacagaaaagtagacacacacacacacacacacatgttgtgttcagctttctgttttatattatttgccattgagattagaatagaacaggctctattcatgcaaactatatgaaatgaaaaacttttaagactcttcattaattggagcttctgggcaacatcgtgtgtgtgtgtgtgtgtgtgtgtgtgtgtgtgtatacagacattttttttttaacttgttgattcagatgtcttggtccctgaatagtcctagattacttattttgagaattcattgttaaaaattacagggaattaaaataattgccttttttttttttagagggtaagagatgggtagaagagtatgcctctgaaaattttattagtttattcttgtggagaataccaagaaaatgtgtatttgcccattgctaaatatgatatatgccattttgtatttatttgtcccaagtgtctttttgtaagaggagaataaacaataaggaattactgatcaaa

SEQ ID NO: 1097 - protein, 236 aa, Homo sapiens
MMIHGFQSSHRDFCFGPWKLTASKTHIMKSADVEKLADELHMPSLPEMMFGDNVLRIQHGSGFGIEFNATDALRCVNNYQGMLKVACAEEWQESRTEGEHSKEVIKPYDWTYTTDYKGTLLGESLKLKVVPTTDHIDTEKLKAREQIKFFEEVLLFEDELHDHGVSSLSVKIRVMPSSFFLLLRFFLRIDGVLIRMNDTRLYHEADKTYMLREYTSRESKISSLMATCSTFPLHGT

SEQ ID NO: 1098 - DNA, 121905 bp, Mus musculus
  misc_feature (1)...(121905): n = A, C, G or T/U
atgatatattgtattattttgcttttttgtaaagcagttagttgctgtacatggataacaaacaaaaatttgattattcttgtgttcgtattgttaacttcttcctgcgactgcgttccatcatttaaagaaaatgctgtgtattgtgaactgaccttgtatatgattaacttactcccctccccaaccaggggttccctgcctacaaccttgttgataatgtaaccagcaggagaacctctgcctgacacacagactccactgctgtggggaaacatgttgacgtctgtcgcagagcatcggcctcacttgctcctgtcctgtgtatgccctccctcccacccacccccccacccacccccttttttttttaaagtaaaatgtaaattcaatctgctctaaactgtgaggagttatttatcacatgcagccaactgtttgtttctctcttcctccatgatctttagaacattagaccttgtccacctttcaggtgtgttgtggattgcctctgctcaccctaagggaaagatctttctccaaaagtaaagtcattgagttccaacaaacaggggtctgtccaacacagaggcaactgtcactctggcataggtgaacttactttccagagagtagcctgtcattacttccaggctccgctaatgtcgtgagcaacttccctgagtgctagtatatcactcaaggagagctactgcccacccctgtaggagacggaagcctcctggccctaggagtagaatacttctctctgagcaaatgacccaaagtgtgcagggctttttatgggcaggtggagacgagaggtggtattctaccttattctaccttgggagctctggaatattctggtaccaccccaggcaaaagcagacccacgggggtggggagggtctgagagagtatgtatatttaaagcatctctggcagttttgctggacacccaggcttgaagacccctgaaactgagtactcagtgctgcaaatagctacctgtccctggggcctaaagcaccttagtcaaaattacccatatctctgcaacaatccagattgcacctcacgattcctagacagcaggctctttgacttggccaaggtttgccagcacagatgctgtcctctgggtatcctcatccacttggccatagtgaacagtgtggccatgggatgctgaaaatcaactggtaacctttaaactgaagggacagcctctccctgcaccctgcagctgcttcctccaggtaaaatagggaggccacactgccatcttgcctgggtcctttctgcccagaagttaagagtgtggccagttgtaagtctttggggtgaggggtggggggagtcaacagctgtaatttccactgccggaattccaaacaaatacccctgcaagaggtttggcctctgccggctgtgaacttgtgactttattaggaaaatggacacgtaactgatcggcatgtgtcctaagatacagggtttttgttttgtttttgtttttgtttttttgaggggtgcacaccccacccccccccaaaatacttaaaagacctaccttagcacaaggccacacaaacaggcactctttccagcccagtgattctagatgcttcaatagaattagaggccagagagtttttcatagcagcttgttggtttgtggagcagaggcagaagggaatgcattgcttgatctctgcctctacccgagctccaccactgaccattcacactagggttctgcaggagacaaaatttctagccaagaaagctggagagaaggctaagcggttaagaacatgggctattcttgcaagggactcagattcgattcccagtgcccacccatatggaggctcacaaccatctatctatatctccagttccaggagatctgatctgatcaccgcgtctgcctttcctgggcactgcacttaacatatgtgcatacaaaacacccagacatataaaattaaaaatctttaagaatcatcaccaaaacactgccactgctgccaccatcatcccaagccatgctgagagcggctctactcctattcccctggctccctgcttaaactaggggctcagacaaggggaagctgtggtcgcaaatgctcggtaacacttaagaactaacactaggttctatgttgctggggaactacacaggcagaaaaacagcaaagaagccctcattgataataccagcccccatgcaaaatcccaaacaaaatagaacctgtgtaaaagatccattgcaaaactctagtcctagggctagggtgacatgttcagagacaccagccagtcgtcagaactgatggaaaatgagaatcaagaaaagccatgctctagtgcaggcatttcccagtcatttcccaacgatttcttcagcttgcacaaccatacatgtacagaaagagttcatttcacccacaaacagcggggagggaaggaaggaaggacaggcagagcagccttcctttaaatacttcaaaagtatttaaaactgggagagagagagagagagagagagagagagagagctagctcagtggggttcaattcccagcacccacatggcagcttacaactgcctaactccaggatccaacaccctcatacagacaggtttgcaggcaaaacacactaaatgtttgtttatttgtttgtttgtttgtttgagacgggatttttcctggctgtcctggaactcactctgtagaccaagctggctgtcctggaactcactctgtagaccaagctggcctcgaactcagaaatccacctgtctctgcctcccaagtgctgggattaaacacatgtgccaccactacctggctaaaaaaatttttaatttaaaacttgtagagtgggagcaaagctaggaatggtaatgtgggtgaatgtggtcaaaatgtatgatacactgagacaaatatgccataatgagacataattttgtagaatgaatatacactaaggaattttagaaactggtagtggctgggaatgtgctcaatggccgagcactcaccaaacacgtacacggtcctgggttcaatccctagcactgaaaaaggcccaaaaacttattgtcattggattagagcaggtccagtttatactgtagttcattttcaccctgctatgtacatcactagccagcagggggctctactcagccagttttgtcgaggcgcaagatcagccagcacaaaggcaggcattgtactgtcccctccaccctgaagaacttggactgctttgggtgttcagtacagtgtctacaaccacacacaactggtgagcacataaactgtgactatcagaattagaagtatatttttaaaaagaaataacaacagcaacaaaacaacaaggttttctctgtgacatcctgactgtcctgaaacttactagaccaggctggcctcaaactcacagacatctacctgcctctgcttctacccaagtcctgggattaaaggtatgaaccactacatccaggtctatctgcagtttgtatgctggggaggtgacacaatgggtcacattgcttgttctcttcaaacatgaggacctgagttggagtccacacatacaaagctgagagcatggttgtatatgcctgtaaccccagcattggggatcccagagggatccccaaagcttgccgggcagccagcctggcacaatatgcacatttccagttcattgagagtccttgactcaggatataaagatgaagcatgacggagagacatctgatgtcccctctgtggatgtcctctctggcctgggcatgcacaagcatgcacatgcaagtacacagatgcttgcacacttaagcttgtgcactaccacggaggagggacatgggggaggtgcagtttccattttgaggaaatgtgaatgattaggtgtgatccataggtaccagactgcacataggtgtgatccacaggtatcagactgcacataggtgcgatccatgggtgccaggctgcacataggtgcgatccatgggtgccaggctgcacataggtgcgatccatgggtgccaggctgcacataggtgcgatccatgggtgccaggctgcacataggtgcgatccatgggtgccaggctgcacataggtgcgatccatgggtgccaggctgcacataggtgcgatccatgggtgccaggctgcacataggtgcgatccatgggtgccaggctgcacataggtgcgatccatgggtgccaggctgcacataggtgcgatccatgggtgccaggatgcacataggtgtgatccatgggtaccaggctgcacataggtgcgatccataggtaccagactgtacagaacagcacagaggctcaagaccacatgggcagttacttctgctcccagtttctggggcttccacgtgcttcattcaccaagtcacacaggtcagaaggaactgtcctatgtccataatgaagtgcaccagaaacgcaggcacgaacatcaggagtcactccatagagaaacttgtgtcttctcagtgaaagacgtctgattgtacctgctttgactgtctcacagcctaaaatgtcctcaggttcccccaaacaaaatcctatgcaaacattaaaaggctcaccaaggctctttatcagcttcaaataaatagctcagaaaagtcagtttcaagaaaagacaggtaggaaaaaaaatgggcaaaggacatgaaagaataatccagaaatgtcacatgctgctgagtactgtgcgatgacgtcctgttagtaaacacgaagtgtatgctgcctggttttatgtcaacttgacacaagctagagttaactgagaggaaggaacctcaactgagaaaatgccccgagaagagcctgtgtagacatcttcttaattaatggttgatgcggggagggtggtgccatccctgggctggtggtcctgggccagccatgaggagcaaaccagtaagcagcactcttccatggcctctgcatcagctcctgtctccaagttcctaccctgcttgggtttctgtcctgacttccttcaatgatgaatgacaatgtggaagtgtgagccgaataaaccctttcctccccaacttgcttttggtcctggtgtttcctcagagcagtagtgaccctgactgagaccactcgcaagctgaaatggtggaataagtttttatttcttgaaaggaggtcttgtttactatgctgtccaagctggcctggagttcctgagctgggactccaagtgtgaactccagcaccgactcagatgccatctcatctgtcaaattaacagatgggttgactagttcctggtgatgagccccaccgtgctgcagtgggcttgcccatgccctgagtacccccagccttaaagatatctaccactgcctttgaaccactctaggaacccagagaaataagtaaggagactgtgacgttgattaatgttcgaatacctaaagacaactgcaatggtaggcttgctacattcatctaatacagtggttctcagccttcctgatgctgcagccctgtagtacagttcctcgtgttgtgctgacctctggccctaaaactattttcattgctactttataactgtagttttgccacattggcggctcacagtagcctataactggtctaggtgacctggcatcctcttctgacctcctcaggcatccgtaggcgtgtggcctactcttgcccaggcatacacacatttaagtaaagttaaatctaaccagaaaccaaggtggatggctccttaggaatgaatgagacgtccatgcaccacacacatgtatgtgcaaaagctcacacgagaacacacatgcacacacacacacacacacacacacacagagtgggtttttgctaatttagattccggggtgggagggggataggttcgtttctccttccttgggggaatatttacaggattaatataagaaggaaagcctgacaaacagttccggggaaaacagcagtcactgcagcccttccctgccctcccaggacttctgctctcagctcccaggctctctgggaagatacgtgtgcactcaagtacacagggccaggcgtccacttctgagcccaggctccgtcctccgttctttgggcttgcatccacctgttcacgctctctctctgagggcagtgtctgtgtccttggctctctttcctgaaactgtttttttctgaacttggaacattcccttcagccctgagaagaaagctggtgtcctggccagagcaaggggagtggatgggcagggccttaccactagccatgacaatgcttccgaaggaaggaccaggtgacctctgagccagcagaggagtgagcacagctgcctcaggggggcctcttggataatgtgacccagggatggggaagtggggacgacccatggagaggaacagcctgtgccagctgtgagtgtctactgatgagctctgcatggagggctgagtgtgacaaactgagaacaacctgtcttgaatagatgatgatgacgatggtgatgatgatgatgatgatggtgatggtgatgatgatggtgatgatgatggtgatggtgatgatgatggtaagtaacaggaagctggagagatggctcagtggtaaagaacactggctgctttttcagaggaccaaggtttgactcacagcacccacatggcagcttacaaccacttgtaactcctgtcccaagagattcgatgctctcttgtagcctccttgagtactgtatgtacatcatgcagagacatacattcaagccaaacacctgtacacataaaataaattaaaaagggggtggggagatggctcagcagttaagagcactgactgctcttccagaggtcctgagttcaatacccagcaaccacatggtggctcacaaccatctgtaatgggatccaaagccctcttctggtgtgtctgaaggcagtgacagtgtactcccctatataaaatgaataaatttttaaaaaagaataaattgaaaaattaaaagtaacaaaaagaatcctggaaggaatgtcagccaccattatcctgcttctgagagttggagaggctctgggtggacagccctcctcacccacgctctggcagacaaggaagaatgaagttttatgacaccggaccacactagtgtagcccaggccaaccagactccatcacccccagggcgcgctgcatgatgggaagtgtgtgagcgctccacactctgccgctgaggcgcattctgagacaggtgaaggaggagaataatttaccaccttctcccctccagagtgataattattcatgacttgagaaatagcatcagcagggggatcaggaagaacctgcgagttctgccccatttctgggcagcctggatggtgaggccggtggatggactacagaggaagaaatacagccctttagggctggagctggagcgcagttggtggagaaaaatacacgatgccctgggttgcatcgtcaatgctgaataaaccatgcgggatggctcaggcctgtaatcctagcccttgcaggggagggggttggaggcaggaggatcagaaggatcaagatcatcgtggcttcgtagcaagtcagagtccaacctgggctccatgagattccacctcagcaatacattccctgtagactagctctgagtctatactgatacacggataggccactatgcgccagacattgggcaagacacatggcacacaagctcacattgaatcctacgagatctctgcaaagcagagactacgtacgacccctgcttcagacaggaagactgacccagagcatcacgcagctgaaagagcatcagacctttgcccggctcagctgccaacatgacctaggaccaacagcgcacatacgtgctgttgggcttaccacaaactacccaaagcctggtggcttaagcaacgcaaatgtgatccctctcagttctggaagtcaggaggtcaaatgcatgcgttggcaggatcgcgcccctgcaaatggtctctctccgaccccttcagcttcctggactgtggctgaagggctcttgtcggttctacccatggtcaggaagccccctcctgtcattgagcttgtctctgacccttccttcattcgcgaggttgcattaggatccttgctctggagcacggaggagcagccaacaagaaggagacttcctataggaggcgccacctccacagaatctgcaatcgagcaaatgggccacaggagttggaagagacaaggcgcagagccagtcaccccaggcctggaggcaggagggaactaaggtatttccgagaggcaggaggcggtcctgatgccaaggcttgtaacctctgctctggagaaatggcagacagagttcagaattgtcccaggagtctgatacgggatagctttggaatttgtttccaatctgcctttggagagcttgggatgtggtcttgggctttgggcttggttcccctgtgatcgatctgaggcctcacgtagagcagttgaggtgagcaaggaaggtctcttgctttccaggttgtgttaccagggtgggctctgagagacatttttgcagctcccaccagggggcaggccccagctgcaacctgctttccatttatcattcattcattcattcattcattcattcatgtgttagtacctcacagagaggcatccacctaccaagaaaagaaaaacaaaaacaaaaacaaaaatcacttttcaggacggtacacctcccctctctagtggttgactccatgaacacggtagactctgatccttaaagccacaaggctttcttcccagggagattggacctctggaagagtaaagcatcaaatggggggacagcctggctcacccttggagtcctgactccaggggagactaagcagtcgccactcaggacatccatatttaagactcatcctgaagaccagaatggaattggaggctcagagagggaggccctgtgtggtccttgtgccaaactgggtacaagtcccctgcactccctgttcacaccactgaattgctctgggctcacacttgaccagagatcaaaaacatgaggacactaagacatagcataacccttagagtttcccaccatgcacaccctagcaaagttttagaaatgcatggggatttggaagaagggctcagaactgaggtgagacagactgaggaagaagcctgcgcatatctgggggctcaggcaaggtctgtgcttgagttgggcgcaaccactcctaagtggtctgttgtgctgaacaaggttgatgggtagacgggagactaggcttgacctctgctcagttgaacttcactaggagaaggcaaaattggttgggtcgtccacacccaggatggagtcccgagctctgagaggctgccagcaaaataagagaggacaggagctacgggttcccaagccaccggtgtttctgggccctgttgacactaagcctaatggaagacacttcctcccaccaccacttctagtcccctccacccgccaccattctaaggttccctgctcctccacactgcgcccatccctttccttcaacaagcggaacggcttctcaggggtctccgcttccagggaagcgaaagcagcaatcgaatactaggcaaggaacacctgcaacacccagcgctgacaaaggacgcggccggtgcacactggctagccgcggggtgcacgggccgcgctgagttccaaccaccccccaccccccaactccagctcaggtctaggaggggcggagcctggggaggctcgggtccttttgtctgcagccccgccccgccccgcccccacgcgggcccgcggcgcgcggcagacacgagcggctgacacgagcggccgccgcgggcggaggctgcgcgccgcagacccgggcggtgcgagcgcgatggcgaaggcggcagcgcggggcttgggctagctgccggcggcgcggatggcgggtggcgcgggctgggcgggcgcccccgcggctctgctgcgctccgtgcgccgcctgcgcgaagtgttcgaggtgtgcggccgcgaccccgacggctttctacgcgtggagcgcgtcgcggcgctcggcctgcgcttcgggcaaggagaggaggtaaggagctcgggcgcgtccccgggccggggaaaccgcagggaccccgcgcagtcacattccgggcctctctgtggatcacatggcatgcccgcggtggccggccggcccacctgccgttccccctggtctgtctccaatcccccttgatgtttggggaggggaagaggtgcccttaaaatccagtctctgagcaccccctcccacacacaaccaagtcacagggctatgtgtgcaccgtgccaggcctacgggtgacagggataagcagggatgttctgcagtctctggtccttagctgtacctacccaacctagaaaagaagggatgtctgctccgggccaccctggattctggtccagttcctggtgaccttccactcaagctaaatgggcaggcctagctggcagcagactgtgctggctgcagagggccaagcaggaccaagccgggagtggttagctgagcctctggtgttggtgttgggccgcatgggtggcagagagcagaattgtgggtactgtcagccaatgtgaaatggcagggtctgaactgccagtgtgtaacgaatacctatgcgttgggctagtgtcctcctgccatcctcacaggggctagtatccgtgtctgagagaagggcaggacaccgtgttaatgaaaccctgcagtgttgagcgtctctggattcaaaagacctggttgaactttgggtttctaaggtcatctgagaccctctgggccttggtttcaactgctgtactggatggcaagtgggaggtgatgacaacccctttctaggtggctgggcactcgccagaacctggaaatccccgagagcaggaggtggaggagggaggcaggtgtcaggtgtgaggactctggtccccagtctcagacagcttactactgcagttctccttaaagtcctttatctcctctctggtttgctcgggagcatctcctgctgctacctcagcctttcttctacagaggatgccagcgtcccacttcttggccaataccttctacctgagcaggctgagcagcccaggaggctacaggctgctggtgtggagaattctccttgctttgggcggaaacctgggatccagaatcagaaaacctcaggcatggggatggcccccactggggcctctggcagagggctggctggagccgtttaatagtattcctaggctggacaaacacctcccatccttagatcctcttccctccgcattccagacaccaaccagcttgtcactgggtcattgtggttctgcacaggaacctacctgggtttcccttctgcactgtagcctataaacctttgaaaacatcactcctctacccttgtcccttgccaccctttcacccctgtctgaagctccaaaccgtttccaagccaactaccaggagctagattcctacagaggctgctggtgaattgtcagactgttttcttagcattagtgggcctggacctgatcaatacacactcatggggtgggggctaccttttcagtggtcctacacactctccactcttaccaagtttctggctactagaacctctggagatgtgtttggaaaacttctgcctaggcagagctcctctaccctggggccggccagcggttcttgtgctttcctaaatccacgagtcgtagcaggagtttctgtgactacagcaggttgcaaatgtggacagtcaaaaatagatccgttatatttctgtcccccagggaggtgacactctggtcacctccttcacaagctgctcctgtgcttgtatgtagcgttctccatgaaatgagatcatactgcaccatgtattctaacctagtgcacacacacacaacacacacacacaaagagagagagagagagagagagagagagagaaaaatgatcctcatatttgaccttatataagctatcatcaaatgtactgtgcagacctgttccacgtgtctctatttggccccaaaatgtccacttctgatgttttttgttttgttttaagctgtgctgcgcacctgttccatgtgaccctggcacggccccctccagtatcctgacttgttaacgaggtcaggccgattgtctctcatttgtttcttaaatctaaaccggtggtgcttcccttgttcctactcagtttgatcttgtcttcccgcgagaccctccgttctgacccacggtgctgactgcagcagctggtgctgtccatgtgggaagccaggggctgagggaggaggatgcagggcaggaccacggacagggtctgcagctgttctgctcacacacacaccagagcactgctccttatagcactttcacaagtgctgtggctcagagtgtttctgttgtttgtttacacatctgcggtgacattgactccccagcccactggtgttccagacaataaccaaccactcgttagacatgagactcaacctctacattttaccaactgccctggtataccacggagcctgggatcagatgcagtaggtcttagagactgaaatagccttgagagtctaaggagttgatgaattagtaatgcaaaaatcccccatacaggagaaacccaggggctggggatggagggagtgctagcctattttcctagcacgtaggaaccctggatttgatgctcaaaactacatttttttttttaaattaaaacatttgccaggcggtagtggtgcatgcctttaatcccagcacttgggaggcagagacaggtggatttctgagttcgaggccagcctggtctacaaagtgagttccaggacagccagggatattcagagaaaccctgtcgccaaaacaaaacaaaacaaaaaacaacctcccccccaaaaaaaaacccaaaacaacaacaacaacaacaaaaaatttaagaaatggatattgctatacaccattgagcccgtcaaaatcctgtcatggtgtggggagggacccacaaggccttagccctccatgtacatttatataggcagttaatagtagccatgggggaggggcttatgaggtcttgcccctctctagagcctacaggcagttaatggttgctgggggggggggggaggaagagtcattttctttaatgatgtagctgctggcgaggtggccatgcttctgtaaataaaatctctcacccatgttcctgtaagcatccctagtggagtcattctgatgaggaagggggtgggggtgaggacatgaaaggggagagaggtggttggctgagaaggggagtgttagtgggaggagggcgggagaggttagtggaggttgaaagtgatcagcatacattccatacctgcacaaaaatgtcatagtgaatcccattattatgcatattaatacaggctaataaaaacaaacaaacacactgaattttagaggcagacacagcatcacacacctgtagaggctcttgggaggtagagacagaaggatcagaagttcagggttggagcctggaagatggcccagtagagacaagcttgctacaaaagcctggtcagtctccctgagaccttactcctggaagctgtcctctgaactccacgtgcacacagtggcacttgtgtgtccccacatcacaaagaaaagaaatttaatgccatctttagttacaaaaggagtttgaggccagctggggatatacaagaccctgactctaaataaataaataaataaataaagcaagctagctttggcagtacatgtattaaaattgtaactatacagagaagattaacacggcccctgtgcaaggatgataagcaaattcatgaaacattccatatttaagatgaatacatatgtaatttgtatgagataattccacggaggagaagcctgtctccccatcccttaagtacaagttactttaagacttcctcagagtctggtggaagaagagggaaaaggtagcctgacagtgaaggaagctgacaaatgccaccctagaatgccaccagatgcttctcccctgcccatagctacggtgtgattatccctacgtggtcgtgagagaacgatcgggcagccccgcgctgggactcgcagctgctcctccttccttgggtcagagctccagtgctctggaagagcatgttgggcatactgtctgggaaggaaatgcagagttagggcttgttccccgaggacccggtgcccctggcactcacgcagagaccctctcagcagaagcactggtattccccaggcctttatatggggtgtggtaggaggggtatagttttggctctggcttcttccttcctactccaagcagtcctaccgggttgagtagacaaggaaacccgaaaccttgaaagctgtctgggcttgagagctgagcagagcagagcctaggcagggtgcagcaagcagcggcctgaaaacatgctgcaggcatccccactcccagtcccagcaagcaagattgtaacgcctcatattttcatagagtggtcatcttccttttggtttttgttgttgctatgctttgctttatttttcatatggttgtacttaacctaggctaacctccaactcactgtgtagcaagcacgaccttgaactcctgattctcctgcttatacatcctgaatgctggggttcaggcctgtggctgcacccaactctacagagtaattgtgaaggctgtctcctccattactctcagcatgtttctagcgtgaagcctgtttccctctgtctcttgtgtccctgttaagggccagggctgggaaatagcggggctgtgagcctaagctctcctgaatggggctagagccatggttgcaagagactgacagccagacatagtggtgcattcctttaatcccagcacttggcaggcagaggcaagtggatctctgtgagttcaagaccaacctgatctacctagaaaagccagggctgtgtggagagaccctattggggtggggtagggaaagaaacaaagagacagaaacagagacaggggagggagggagggannnnnnnnnnnnnnnnnnnngggagggaggaagggagagagggagggaggggagaaaggagaaagagagaagaggaagaaagagacagtcagggagggggatggacagagggaaggaaagaaggagcaagagggaagaatgggagggagggcaatgagggagggggagagagggaaggaaggaaggaaggaaggaaggaaggaaggaaggaaggaaggagaaggggagggaggggagagagggaaggaggagttagaatgtctggctggcagcttacaagttgtcacccttagggactctgctaaaatccattacttacagcctctgtgtcctcagggacaaggtagcagaagaaatcaaatccccaaaacctgtccagcaggcctccaggtagccataggccatcttatcgcagtgagaaggtctcttcttccctttggactcctgtccaaagtccagcccacatcatagtgctcctagcttaagccacacaactcagagaagagtgacagagttctttagaggctgttcctgtgacctgtagtgagcattgtccccaagagggtcccaggctaaagtcagcacccagactaggcaacaacaaggctcctatacacaaaacccaagcctgaaggtggggaggggtggcgggggtgaggggaggtgaggcttctccatgagaccttccattcagtgcctgtgtctttctagaataatcctacagggaattggagactcgccacttccaaagccaggccatcccgtctaggcaaaactcttgagtctctttgatgtcatgacctgaggctgtattctagcactccatcctactgtctgcccattcatccatctgcccactcactggggaatccattcgtccagccactcttccatcacccactcacctgtcacctcccgtatccagcttctactttgcagatccatccgtccactgaaccgcctgtcagcaatgtcttcctccactcctcattcactgtatgtttagttagggtttctatcgctgtaatgagacaccatgaccgaagcatcttgaggaggaaagggtttagttggctcacacttccacaccgctgttcatccttgaaggaagtcagggcagaaactcaagcacggcaggaacctggaggcaggagctgaggcagagaccacaaagggatactgcttactagcttgctcttagtggcttacttagcctgctttctcctagaacctaggaccaccacccacagtgtgctgggccctctcacatcaatcactaattaagaaaatgtcccgaaattccctgcaggcttgcgtacagcctgattttatggaggcattttctttcactttttaaaaactacttgtttcagtttatttatttatttatttatttttatgtgcattggtgttttgcctgcacgtatattcagtgtgagggtgtcagatcccctgaaactggagttacagacaattgtgtgctgtcatgtggttgctgggaatcgaacctaggtcctctggaagagcagccagtgctattaactgctgagccatctccatcccagaagctttttcttaattgaacttccctcctctcagatgactttagctatgtgaagttgacataaaactgtccagtacacccaccgttctttagtcatctgcctgtccattcacccacccactaatgcagtctttgcttctacggtgcatatggccacgtacagactcaggagtgggacctcattgtcacaggatgccaagtggctgtgcgtagttaaagtcacaggaagggcttggagagtgaggactgaggccgaaacaggggcagatggtgaccagaggaatgaagcaggactgtctggttcttgtgtttagaaggacagcacatcccagtacgtgctgtcccagctggcatgaactatttttataatttctcagttctgcaggctgttgcctgtagaaaggtctggggtcatcttgaaaggagttgcagcctggcttcttcttaaaggagctcattaggagggatgggtctgcccacttctctataaaggtagagctcacgtggctgaagggacagcttagtgtggctgctcttgcagaaggcttgggtttggttcccagcactcacatgccagctcacggccagctgtaactccaactcctggggatctggcatcctcttctggacgccagttgtggctgccatgtgggcactgggaactgacccaggtcctctggaagagcaatctatgctcttaattccagcccagatgatttttggaattgtttgtttatttttttcaagacaagatataaccctagctgtcctgcaactctatagaccaggctggtctccaactcagagagatccacctgcctctgcctcctgattgctgggaataaaggcatgcaccacttctgccagacttaattttttttaaagatttatatatatataaacacatacacacacacacacacacacacacaaaattgctctcttcggacaccagaagagggcattggatcccattacagatggctgtgagccaccatgtggttgctgggagttgaacccaggacctctggaagagcagtcagtgctcttaactgctgagccatctctccagcccctgattcaaaattttataataatcttttcaaaaaggattcataaagtagcagtcaaggcgatttttttggaaggctagcatagacttaccatacccttcccagagtgccctggaccatggaggtgtctctaacgtccctcagtcccagatgccgctgtcgctttctgcgtggtactttccactgcaggctctcttgtgcaagaagagagttcttctcacctccactggtggttttttgaacaggaagaataagggacagacagaaccatttgtcactggcctttgtctttctccattcatcctccagcaaacagaggttccaagggctgaagtgacttgtgcaggacccatgaacacaggtcccgctggttccaaagctgcctccttgctgcctgcaagatctggggtctcaggctctcagaggccagggatggggaaaccacagcagaaggcttacctggctttttgagcctggagtggcctggttggaagcaggactaagcggaattgggttgtgatctgtgagcccttttggagcccagcagcaacctaagtgttctgggaagacagccggcctctgtggaaggcccagaggctggaggatttgatgcttggggtggaagaggctgccagtaaccacaccctgttctgttaagtaggccagagaatgtgttctcgggctcctcagcacctctgctttctcatggcttgctctctgctagcagcctgttctgtttatcccacctgcatctcagctctggccaaagggccctgccttcaggggggagaggcactggctgcaggcatttcccccccccccgcccccccccactacaggatcccaagaaatcactgctctggcccccttgctgcagtggggtgctcactgcagtgcctgctgggtcctacaagtgacagttaactctgtgcactggctgtgtttgaatgggtgagatgtccatttatttttttccataggccttttctagagcctgccccatgtcacactggtggctacagagccacagaagaacagggcattcctctgcttagctccctaatgtgggcaggaaggctaggagagaaacctggggtggggggcatttttacattgtgcatgtgtgcatgcgcatgcgtgtgtgtgatttgtagttgggaacggggatggcgtacagcatgacgcttcactacataagtgtactgtggaatgagccaatcaagctaattagcctacttcctccattctcagcatttcggtttagtgagaatattggaacccactcctgacatatgcatagttatttgctgtagccacctcgcaaaggagcagagggttggagcacagttctcttgtctaactggacccctcccctctcacagtgatcccttttgctggtgtaacctgatgagcctggaccctggcgggatggagtccctgggtgcagcactccccagagggtggaagggtcctgtgtctggaaccgaagccctaagggaagactcctgagctgttcccactaggctgggcctcctttgtccctgctcactgttctgtggacatgactgctagccagaggactggaccaaactggactatggtgtgggtgtctcagagcccgggccccaaatgcacactgccagctacattctttctcctgctctcaacggtcaggatataacctagggcttcagcatgctaggcacagtgacaccgagctaggccctcagccctacattttcatttgtaactactgctgtggctgttgttactatatgtgtctgtgtgtgcatgcctgtatgtgtgcatgcatacattgctgagaacttggtctagtattgagctgtccccaccccatcttctaggtccccccccccccccagttcatggattcctccctttcccataggctataatccaggtcactatcctttttgatgcttaaaggtttcttttggtttgttttagtatagaattgaaacatgttgacatttgatataaaattttatttatttattttggtgctaaggatggaacccacagcctttaccacagatccatatcctggtccatcactgccttgctttttgttattgttttgtttgagacagggtctcatgtgaccccaggctggcctcaaactgcagccaaggatgactctgcttccagtgttcctttctatacctcccaggtgtgggtatcactgagatgtgccacgggctctgctcaggtgctaggggctgaaccagggcttttacatgctaggtaacactctaccaactgagccacagagtcagcccctcaccagcccctgtcaaagaactccctgaggctggggttgtatctcagtagtagtgtgtttgcctagcctgtgtgacactgggggtgtgatccccagcaccacaaggatggatggatggattggtggatggatgggatgggtggatggatgggattggtggatggatggatgggtgggtggatggatggatggatgggatggataggatggatgggataggtggatggatgggatgggtggatgagtagatggattggtggatggatggatggatgggtggatggatggatgtttgggtgcgtgggtgtgtggctgggcggatggatgcatggatggatggatagatgggatggatgggatgggtggatggcggatatgatggatggatgaaatggatgggtggatagatgaatggatggatagatggatggatgggtgaatggatgggatggataggatggatgagatgggtgggtggtggatatgatggatggatggatggatggatagatgaatggataggtagatggatggataggtagatggatgaatgggtaggtggatggatgggtggatggatggatggatgggtggatagatggatggatgggtaggtggatggatggatggacggatggggagatagagctctgacattctctaacacttacagaatttatatctatttatagataaagtcaagctgtgtcatccaggctgaccatgaactcataattctcctgccttagcctcctaattgctgagattataggtgtacaccacactcctggtttcataaatagatttcaaagtaaatagcactgtctcaaggtctttaataaatattgtattcaacccactaacttagacagcccttactgtatatccagtcttcctcatgagaacaaagtactaaaaagtagcatcttatggggctggggagatggctcagcagttaagagttcttccaggggacctgggttcaactgccagcaatcacatgacagcttacaactgtctataactccagttccaggggacctgacaccttcatacagatatatatgcaggcaaaacaccaatgcagatgaaataaaaataaataaataaatcattaaaaaattaggatcttaaaactatgctaaattaatgttaagtgttgaatgtgctctgttaccactaagaataaagtacgtttttcactctttacttatttttaaatttttttttctttttatgtgtatgggtattttacctgcatgtctatccacaatactgataatgttcagaagagggcacccaatcccgtgggagttacagacagttgtgaaccaccatgtgggtgctgggaattgaactcactacctctggaagatcttactacatagccttcctggcttcaaactcacagagatcagcctaactatcaaataaatgctaggattaaaggcatatgtcatcacacctggccccattattattatttttaaactttttaaaaaagatttatttatggccggacagtggtggcatacatctttaatcccagctcttgggaggcagaggcaggcagatttctgagtttgaggccagcctggtctacagagtgagttccaggacagccagggctacacagagaaaccttttctgggaaaaaccaaaaaaaaaaaaaaaaaaaaagattgatttatttatttcatgtatgatgagtacactattgctgtcttcagacacagaagaagagggcatcagatcccattacagatggttgtgagccaccatgtggttgctgggaattgaactcaggacctctggaagagcagtcagtgctcttaaccactgagccatctctccagcccccattactttttaaagctacatgttagcagcatataggaatacaatttatttttgtcaatgtatctttatttgaccactagcatgaattcacttattctagtaattttctagctgatttccatggatttttctaggtaagtctgtcctcttcaaaggtaattattgcttttctgtctgaggtgtgagatagaatgagcatgggagatgtgtccttgtgggaaaaggagaggggcatgttgggacattggccacatggcctcatgcagaatcaggcgagcaggccaggttagggcagatagctgggcactgccgcctgaatggcaggctgtgttgggcaggagatgatggatcctggagtctgaacatgggctgctgtgggttaggggctgatgtagaaggaagaggccgggcaatagtaagtcaggagtcttggttacggatctagtgagactccagcccacaaacaagacaacctggacagaagtgcaaagaatggaccagtggatgctggcctttgctggcaaggcattattaattattagccttgggttcagagttggccttgggcatccagagccgctgtgcagcccaggtagctccctgagctctgcagtggtctggactgctggtagagccagtaggtgtaaggttcagtggggctgccagaatcgggacttttcttatcacatgtaaaggggtgagcctgagagatggctcagcaggtagggacacttgtgtggcacaggtcttacaacccaaatttgatccttggattgttcaaggtggcaggagagagttgtcctctgacctacacacacatagtcaagtgtgcgtgtgtgcacacacacacatagttattttttaatgcattgactgtagcataccaccattacattacattacatcgcattagcagctggcgtctcagccctgatcttctttggttttattgtagagcaagaagttcattgctctcccagaggtcctgagttcaattctcagcaaccacatggtggctcacgaccatctgtaatgggatctgataccctcttctggtgtgtctgataacagctacagtgtactcatataaataaaataaatctttaaaaaaaaaaggttcgctgaacatactcctgcctacggctctcacagacgtagtccaggtttgcccgccggttggcattgggcagaacccactttttggccttgtctgtgaggtgggttgcccagtgggggtacgggggggggcattactgtgcctgtgactggaagagtgagggcaagtgcttggcacaggacaaagtggtgtgtctgaagctccttgttctgggaactatcattgtggacactgtgaccttaggcacactcagaagagatggtaccctgggatgaggtggttaggactctggcccctggggacgggacactgtggccttgtttccactgttgccgtgctggccgtatgacccaggttgatggtggtgacggtggtgataccactgctcagcacagcagttttagagcagatcaaagcactggtagagtgcagaagagaccgagctctggtgagttctgacttcctcacttcctaacaagctgagggtaaccatttctccttagtaaaaataggcctaagaatagcagctactccataggcttgtggagtatgtctggaatgattctggtaatgctcttaggagtaccgggctcagagcagctgctcctgttgtccgttgttattgtgccattattatcattactgtgactctggggacctcactttagggagcttgctgtggtgggcggggctggtagtaggtgagctaccacatctccagaggatggagtctgccctggggtagaggtgcgggtgatgacacggcccctctgcttttctgttggattctgggaccgttccccttccctgcccctaactgccctggagttggctcagagaacttgagtgtgttcacagacagggccctcagcaaaggccatccctgccactccctgcctggcagagtctagcgctgctcagcccggttccttcccagggggaggattccgtaggatttactgggaactgaacactcaggttccagaggttccctgctggctgccaggctgagcagatctgcgctgggatttagaactggcctgtgccctcagcccagagggcccacgtctgaacgcttgcctctctcctgacctggaagacctaaggcttgtctcgtggcttgtcacctccacaccaggcagtctgcagctccgtcttctctggtacccggaaccttcttgcttttacccttcccgctctgccgcagcctccagtccgcatgcccgctttgggaaaggagacctgaattatgaatcaaggcctgaatcatgtatgaggactcttgccctatttggtgttgcagtacctgccggggaagggtttgcatctgcagagagcccttggtagaacagacctgaactttttctagtccctaaggaacttccccagccggcttcattgcctccggctatggaggaaaaaggcagccacaaagaggcagccctgggcctgaccctggtcccctgctctggccagggctgtaagagagctgcagccattttggggagtccaaagctgcttcttcacttaggacgttgcttgaggacagagctcacctaggttccgcccttctgaggcgcgtgtcaggtacagtctgggaggaagcatccctaagaggctctggcagcaggggatgggcaggtggattgtgtgtcctcactaaggaccggaaacccctctcacccagattctgtctctgctgccaacatggccgacttagtgtcatgtgcaaagcagcacagcagtaaagggcagcgcccaggacgtgaggaatcctggtccttcggaagtcagagggaagcttcatgagcagggacagggggtgggggagccagtggaagctgacaggcctgtgtgtctcagactgactgatctgagagggctgtgtgtgtgtacatatgtgtgtatgtatatgtgtatgtacatgtgtgtgtttgtgtctgtacttttgtataggtgtgtgtgtacgcacgcgcccacacacacacacacacacacacacacacacacacacatgctcatgttaaacccgactgtcacatattccggatcctttctctgtcactcctcacttctctttctttctctaagctgattaactagaacattgctgtcacagagaagagcagtaaaggacctgaggacacatttcagtttacaactgaggacgctaggcagactgaacctgccacacttgctgcagctcttgttactcctggcagtgtacaattaggacttctgtaagaagtggaagagagggctggagggatggctcagtggttaagagcactgactgctcttccagaggtcctgagttcaaatcccacaaccacatggtggctcacaaccatctgttggggatccgatgccctcttctggtgtgtctgaagacagctacagtgtactcatatacataaaataaattaaaaattctgaaaaaaaagtagaagagaattaaaaattcccgaagaacatttatatacacatccagaaagaaaatctgcaacatcttaagtctcttgattattttttcaaaaaaaaaaaaaaatgttgagacagggtttctctgtgtagccctggctgtccaacgaacaccctcagtagaccaaggtggcctcaaactcttagagatccacctgactctgtctccctcccaagtgctgggattaaaactgtgtgccaccactgcccagtttgaacactgtgtttattctttgtgaagttcatgtgatgtattctgattatttttacctcccctcccctgactcctcccagatccactcaactatgtgccctctttttaaaatttaaaagtctaatttgtgctacccaaatacccttaggtggggccacctcctgcagtgttatcccctcaccaggggtcacacgcttaaagccggctgcccctctcctggctgccttcaattgcaaggcttgtctccgtctccaagctgggatttgtcgagcatgagcaagtctctcgcatgctgtcacaaccacgtgagttcatacatgcaccggccctgttgtgtgcagaaaatgctctctccctatggtcacccagcgcctctggctcttacaagcctctactccctcttctgaaatgtgtgagccttgggaggatgggttgtgatacagatgatccagttagggctcagcactccacattcttctattctctactccttagccagtcctgggtctctgtgttaattgccatttgctgcaaaagatgagggccaagagattcactaatctaagggtacagccgtaggtcgttagcagtggattcagtacttcattacacctgacgctcattgttgaggctaggctggctggcctgtctcctccctggcaccggattacaggcacacactgccacacctggctgagagaaggcttttcgttgtggtcattctggggatggaacggcaattgtgcatgttaagtgtatgctcagcctcttgagaaccacttttcctgtgatagaccttgagactcctagaccttgagactcctagagactgtggcaaggggctcaaccttcctgggcacagcttgcttcatggacagaactaggctggtagccctcattgtttcagggcaggcatgatggatggatggatgggccagcttaatctttgctttcttcattggtttgagatatcttcttggtaactccagcagggcctgattactgaatccattacaggacagataggtttctggaaatcggccctgtgctggtttgaaggatactggctcccataggctcatatgttgggatgcttggtccccagttggcagcactgtttgggaaggattaggacatgtgactcttgttgaaggaggtgtaaagcccacaacaatcccagttaactctctcggtctcatgcttgtggatcaagatgtgagctcgtggctgcggctccagtacctgcttatcaagtgccatgttccccatcatgatggtcgtgaactcactctctgaaattgtgagccccaaataaactctaagttgccttggtcatgctgtcttatcaccacaatacagaaatacctaaggcaggcccctttggtcgatgggctggtgggggcaggtcctttgcctggcctgtgggcactgaggttccactcaggacccctgtggaatttcaagagaacagaaactgtctggtgagcaggacaccattcccccagtagccttcctaggggcctgcctgattcccacaggattcttaataagccactgctcaaatcaatagctttcaagtccaaaattctccttggtctccatggttacagtgcaagttggcctttgcatcctggtcatttcacaggagaaaaccccaggctcaagggggctacagtttgtttgtgtctgggtgggtggtgaggctatggtcctctcccaggacctgtaacctttccttcatcgtgtggaggagcggcaccagggcttctggctggagctgccttaatttgttttgcctcggaagctaaaacgtgattccccagaggctgtgaggtcttcagcccaattgcagcttctgaggaagagaggaaggcatttcatttgagtgtgggagaaaccccagtaaagttctaggatgaacagtgcccctccagcagccccaagaatcagccaggcatggtggcgcacgcactcgggaggcagaggcaggtggatttctgagttcgaggccagcctggtctacaaagtgagttccaggacagccagggctacacagagaaaccctgtcttgaaaaacaaaaaacaacaacaaaaacccaaaagaatcaacagtgtccacagaggccctgacactgggctggaggataccagagaccacttgcccacggtgtgacccctagtgtgcccctcccttggggaagcattgtccaagtgtccttcttcccccttacaggctgagctccctggcccacagccaggaaacagttcccaggggtgcgccctgccttgccctcattaattcttaatcttcctaaaccttaaaaaaaccaaagcaagtagcatgcatagattggacctggcttcagaattcaggactgggccatcaatgtcaactagaactctgctagtccaaggatggctgggattggcctggtgctaggagcagttagaaaggcaggctcaagagggagggccaggggatgtagctcagttggtagaatgtttgtctatcatgcacaaagctctgattccctgcacttcatggagacaggcataaacagtgtacagtaacaggcagcactaatcccaaacacgctacaggtagacacaagataaggagttcaaggccaacctgggctacctgagaccctgcctcaaaataaataaataaaaacaaaaataaaaaatgagaaaggaaaggaaaagaaaaagggaaagaccgaaaagcagccttgcaaagtgagaacctccacccaactgattggtcgagagtctcccagtctctgtcctgtcagtagctcagagtaggggtatccatgtctttcctccccactgagagaacagggcggtggtggctgtgcctttgagctatcatgtaccccgatgtaccctgggcctcaaactcatctgcccgcaccctgtggacctcagcacacctgggggctggtgttggctgagtgaccgagagaagaagctgtgtttgtggccttccctgaagcaggtcactgaagccataggacaaaaccttgtccctcacagtcagccagagccacccgtgtcctcttggtggagacaagttccctcttctgccacggctgcccttgcagaccggtctgtgtcatcagtgagacaatggaagactggccgggagggccttgtgtctgagagtccaggggacctggatttgtgatcaggcagacatgccaccctggccgaccaaaacctacccgatgccccaggtgcattggtcaccatctccttttctatagagattcaggaaatgacccctaggtgtcaacctggcctccctgtgtctgtcacaccagaagcaaacttccttctttccatccccacatggccctggcttctcttctggactggactggcctcattaagctctacctgtcttccccccctataccttccagcaccttcctaagtacaaacctgggtccttgagcccctgctaatcactaccctcacccccagcagaggacatggtgacttcctggccagcttccctgccctctgtgttctccagccaccaaagcaggtgctgcacccccaaccagctggtaccactgccgcctgtcctgagctcctgtccacccctcccatgtcttcttgttctctccaccttttctctgctccccggtattccccacaactgaatgtttgctgtgtccatcctttaggtccagcacagtcacatcctctggctgccccagtgtgaagtccccagccctctggactctccttcctttaaatctccaccaacaggactccagaaacatccaggaggtgaccttatggccacttctgtcttaattacccctgaaatactgtgagccttcccttttttactgtccccaccaccctgctggggttcttaaatgatccaattccgtttttaaattcagcagattgaaaactcttgtgagaggaaacggaaggattagccaccagccaatatgcagccgccagccagcacgcagcagagcagcgtctgctgagagcagcctctgaggagagcagctcagggagttgggacagtgttacttctctagagcctgcgtgtttctaaatcccagcagataatgaggtggaattcagaggctgagtcattggcctttgctcacaccactggtgaacggaaaaggggggattccagcccagctctgtctaccacagagacctggggtgacatacggcccagacgtgtgggcgggtgatcagtcacctccatgcttttatgctcttcccaaggctatttttattttactcctaatgtacagcaggacatctgtcctttccctggggacttcctgggagcttgtcattctccccgtggagctgaagaaatgtttgctgaaggcagggacagaggacagcctacttcaggggccacccacacgcctgtcattttcattactattcagacactaaacaaagctctcgtgggtggccagagggactctgcactgtagcagctcagactgattaaggggccgctggtgacacctggacatgctggatggagtcttgaaagggctccagccacagcttagctgaggctacactacccaggacgggtggcctgggccatggtgacaggtctcctttcatggtatcttaccctagccagagacgtcccaatagtccttcttcaccaccttagctcttgaaatttccttcatctttttcaccaacaaaccctggaagggggaggggtgctgtgtacacgcgcgtgtgcagggttcagctcctgtgaataagcagggaggccagagcaggatgccaggtgggtgtcctgctcttccttattcctttgaggcagggtatctccctgaacctagagctagactggttgccagcaggccccagtgatgcccctgtctgcactcccaacagcactgggggtgcacatgcaagccatacccagcgttttacaacacggttgctaggctccaagctcaggtccatgagttgcagtgggtgctcttaccagcccaggagagtttttccatcagggaccctcagctttgggaagaaaaacccatatatggctcaaatgcagagaaaaaaacctgcctgtgtgtgtgtgtgtgtgtgtgtgtgtgtgtgtgtgtgtgtgctatgttgagaaagcacagcagctcaaaggtagcttcctaaagtggcttggaggcatcaccctttgggaagattcttccccagtgtcacccaagatgcatcctctccaggaaaagagggtagagaacctttcatgactggctcacccctcccccatcagaacccctgcagagttctcttcctgtctcatctcagtgaaccgaggtttaacagacatttgcctaaagcaaactcaggtttggctcagtctgctctttctggccctgactgaggtatcctgtgcacctggtcaaacaggggtgggtcaggaggagaggagagcagccatcaggacctgcttcaggtcttgccattatttgtggacattggttgagtcctccacagggccctgtgccttagagggagacactggctactctggttttcatctcttccctaacctcgtgtgtaccccaaacaaccctggggagacaccccaactctatagactcccaaggctgctggtatttagtgttattcagcgcttccatttttttccaaaaagggaaactgaggcataaagaagaaggtgctctccaagactcctgaccaagtaccttgatggtggagctgcaggcaggcccctctgcccattcctgccagaacctgttcccctccagctccctcaaagcaagcaccttttcacccagcatccttggcgagcatggtgcaacgttcgttattccttgcttagttattgtcttagttgatcctgagagtcagcactgtagatgtgtgaaaaccagtcttctaggggtaatgtgactgcacagattccactgtagacacagaccacaatgccctgagcatcccatggggtgcaggctttgggagtggtgattaggaactgacaccagactcttcagcctggcctaaggtatggggactgagtggtaggaccctctttggaaactcttccctctctgtctgcacctggctctgtgggaactcttgccttgctcccctctccgccctccctgagaatccctccctgagaattagcggaggtcagtggctgcctgcaccctttgtcttctggatttcagaacacaggccttattgtgtgcctgggaaagtggataaacaagcagctgggcctttggccctgaggccccagaggccccagagaagagtgagagccctctgggtgggtggcagggggaaagactggtctgcaaagagaagagtcccggatgctaaggtgcttctgcctctgcctcctgactcctctaatgtggggtgaggccagaggactatgtgctgtttctcttggccagtgcttctcaatcttcctaatgctgcaaccctttaatgcctcatgatgtggtgaaccccaaccataataaaattattttcgttgcaacttcataactaattatgctactgttatgaattgtaatgcaaatagttttggagacaaaggtttggcagaggggtcttggctaggttcacaggttgagaaccactcctctaggctgttgagaagactctgaggaagaggcctggagattgtgttgttaggacaaagcactgcagccagcctcctgtctgcaaacccagggtaactgtgactgtcccctcctcccacctcctgagtaccgatctgacaaggatgccaccacacccagttcctgcaggggatctaactcagagtgtcccattgcagctacaccctaagcctctgggcctcggagctcagggccagccctccagctttgcttcagctagcccaggcaccagcctttgctggagtcccccttccccagcttcttttgccatttgctatccctatatcgctctcctagccagctgccggcaccctggccacaggtccaaggacccatgctacccaaatcaaaaaaccccaacaaacctttgatgaaacatggaaacagctgggtcatcttagagtcagtaactttgttaccatgttttccagtacacaatgttaccatcttttccatttgtgtggtgaataattttggattgtgttctgggcatcttgaagactagaagactctaggtctcattagatatctcagggaaatgtcagcatagtgtaggtttctttttaattaggaaattagtccagttaagttgaagcctagcatctccgcttgcccgctctgtaagcagctcttctaacgtagccaattccgttcccaaagctggtgccgggctcttcatagcttccccatggatgcacacccacggccggtccactgtctccttagtcagctgctcaattctgaaatgatctgtttactcctgtctgcagctcaggacttcagtcagcctcacacaagggtctccaaccactccccagctccaccttctcagggtcctgccctgcccatttcccaggggctcttttcctaatttctctctcaccccctctacccctcctctcttctctgccaccactgccacatacacatgactgtgtggctgctgccaccactcagctttgggacctaagcttgccttgtgggagagacagacagacagacagacagacacacacacacacacacacacacacacacacacacacacagaggaaaagggagagaaagaaatacctagggcattttccttgtttttttactcaggtgggacccctctccagctttgcatcagaaaggtttcttttagatttagagccccctctctccccatctgctgcacaggaaatagaaagaagggtaaagataatcccccaaattcaaggttttgttttccctttgttcaccctgtggagccttggctctttaggttcctcacttagtgctccggctgtggtctgtgggagagacaggatgtggggtacttgtgtagctcacccagagccaggtgtcttctcaggttggttttatttgtgtttggggagggggttgctttgaggtctccctatgtggactaggctggctggatctagtgaccatcctgttgggggttactgcacatgccaccacgcccttcttcccagagctttaatattggcatctgagtaacaggctcgaagtctacagtctggatgatgctagtggccaatctttctttagcagttcaatgtcttttaactattctttcctttactattccagttcttaagcaaggattgtctgtactggtgcaaaatttcttagctttgtttttttctctggtcagagcaaggcctggaacttattataagtgatcaaaattatttcaatagcaatagttactgggggttgtctgggctcagctgcctcctcatggttttaggaccttaaccccaaacatctgagcctagtgtattgtcctcatctgtaaaatgggaataagaatactattcaggacccagaagcctgtgaacctggaataagtctgtctacagcgtgatcaaacagtgcctggcataaaggcagttgctctgcacttacttgattcttggtaggaagggctaatgtttattcactacctctaagtgctgaaagcctgagatcttagagacaaagggctgcttgaccttcactggcttgccaggcctgtgtgggggaggtctgggaggcagctgggcttgggagagatcttaccagtaagctgaccacagctggctcacagcatcacagcatccttccatcagagacatgcgactctgggggatagatggaagaaaccagcctgaagagaagagcaacagaaatagaaggggaagcctggtaattgaatggttcccaatgcgaaagatcagcatccctctgccagcagaaccaccagttcctctggcagcatgctgctggtccagctgtgcgtgtctcagctgttccatcacccctgccagccccggggcttgctctctcctctcatgggagccagaggagcccgggactgctggctctcagtgttacctgctgtactccttggtgtgagagtgagcccctgcctcttcctggaactcagcagacccagcatcctctgagacaggatctctcttgtagcctgacttcaaatacaatcctccagaatctttatattcctttgaccatgttaggaagtgaggccagggcttgcacacactcacagagcagcacctcagccagatctgtcttcacacgtgggatgtaggggctttgagtcggtattccttgcacacaggtggcccagtagaggccactcacttgcagagggcagggaagcagtagaaagcagttgctggtactatagggtcaggaagctcctgttcagtagctgccaatgctggtgactgcctaaatggctcaatttccctgagcctcggtgtcctcaaatgtaacatgggactgttacaacagctgctgtttaaatagctcaaaatgagtcctgatggtcttgcaaggatttttttttcccacccatttttacaaaatactgatagagccttgtttaaaaaaccactgtgtcaggtgatggtgacacatgcctttaatcccagtacttgggaggcagaggcaggtggatctctgagttcaaggacagcctggtctacagagctagttccaggacagccaaagctatatggagaaaccctgcctcaaaaaaacaaaacaaaacaaaacaaaacagaacaaaaaactcaaatcaaaccaaacaaaaaacctaaataaatgagtagatagataaggtagatagatagaccattgcaaccactgttctggtctttatggatgctaattgtatgtgatataagaatttactaattatagtttccacaaagctgtcttagtagtatatctagccactaccctgggaccaccaccctcctgagctcagtggaggtagctgaagagaagtgagtcactgtagttgtaagctcttaactgcagtctggatcacatctctgtcgactgtatgaaggtccttacagcctcacatctctgtctgtctgtctgtcatcagacaccccaacccctacctctgaactagctttctctggaagcagaggatggacagcctgccccagtgatgtccccaggtcctaggcattagggattaccagtctggtagattatggaaccctgctgtccctcagagtgtgtgaggtcggagcttctcttcaggccgttgacactctggagtagatgccttggacttggcctcaattaaggcataggccttggctttggaaagggctgtaggggtaagatcctagaggctgggggttggggttagtatgtcccaggccctccttacattcataggctctcttaatagcaggggagggggcaggaggagaggatggccagtggagccatgggtgagctccccgatagtctgcaggtggcacctgggctgtactattctcagaagccccatcattgcctggcagtgtcagcagcttccttggtagtggggatgggagcagggctggcagctgcaatgttggggatgctctgtccaggcctgagctggcaaaaaaacaaaaacaaaacaaaaaactcttccctgttacctgacattctaccactccatggcagctgaggggaaggactggggctttctcagctttggatagtgcacagcactacgggtctctctgaacctcagctatagcattcccctgagagttgaggatatctggagccgagggatgcgctactaggtaggcaggttcagaaacatcttaggacgttgcatagctcctgggttatcctttggatccagcagagcaggaaagctggaaagaggtacaaagccacagccaccatgcacaggagtggagagtggccatggtgggagttgtgctccccgaagcccaccaagccagcccgtgatgctgactgctgcagtgacggggactaggtgcccgctgcagctgccatgttggacaagcatcctgtggatgtgcagggaagacaatgtgagagcagatgagtcttccacacctgcctgtgctctggcacacgtgacaagcagagctggagggagggcagacccggctgtaatgatgccaaaggcacagcagtgacagatctctaccctgcatgtgtgtctgcagcccagccagaggggattccagaaagagcttgcccttgctttctgaatctttccccgaggaagatacacacaagcgcttgctccccaccatgtagggcaagccaaagtaccattccacccaagtacaactctcggggaactattgtgtttatcgggcttacttgcagaacctgggtaaccccaaagcagctgtatcatcaaaaaaaaaaaaattctcgctctaccatggacgacggtttctgcagatggtcatgacttggggggaagttgcctaaggaggtgcatgagtatggatgtgtgtacatgtgtgactatgtgtgtgcgtgttcatatatgtgtgactatgcatgtgcatgttcgtgtgaccgtgtgtaactaaccagttaccaccatcaacaccaggcaaataggaggtgcacagtggacagctgttgaatgagtgagtgagtgagtgagtgagtgaatgaatgaatgagtgttaggaagggccgctactaaggtacaagctaacttggaagaaatgtcaagaagctaaagtacatagactagggacctagctccttagtaatttgcatacacaaggctgtgggttcagtcctcagcattgcataaagactggcgcagtgatacatgcttgcagtcccagcattctggaggtggaggcaaaaggctctgaagttcaaggttatccttggctacctaacaactttgaagccaacctgggacaaataaaatgctgtttccactaaaaaacccaaaacccaaccaaccaaacaaccaaacaaaagttgttagccaggcatggcggtgcatgcctgtgatctcagcattcaaaaggccgaggcaggagaattcagttttaagctagtctgagctacatagccagaccctgtctacaaagtagacaaacagtgaacctggcagcagtgttggctttcagtgtgctgtctttggagaggctgtaggagcatgctctgcacccttgaggcctctttactttttctcacttgagcctttttgtttgtttgttttgttttttgagacagggtttctctgtgtagccctggctgtcctggaactcactctgtagaccaggctggcctcaaactcagaaatctgcctgtctctgcctcccaagtgctgggattaaaggcatgtgccaccatctcccggcctcacttgagtcttaatcagagaatgacatgatcctagagggaaagaccacattgggaacactggtgtccttttgacctagttggcgagacccacccacctccattccaccttctgcctggtgccctgggcccttgggatgtccagggtgcttcaagcatgtcctctttccttcccaaaggtggaaaaacttgtgaagtgtttggatcccaatgacctggggagaatcaacttcaaggatttttgccgcggagtattcgccatgaaaggtgaggtccttttgggagcactgtccagataggaggccagcacacagggtaccagagcccagggtgggtcccagaaatgggttctgttcctggagggagctggctgccatgtctctctcctcttagggcttccttatgtattatctgccctctcttctctgagcccttcctaactcctccctttctttcctcaatcctctctctctctttttttcttccaaaattccaaaggcagttttaagaactcacagaatactcagcttttctgtcaagttcccccaagcccccgaggaaatgaagctgaggaagcccaggcgcccctaagattttctggaggcatttgtttgtttgattctctgtgctgagcagggggtaggagcctcctgacctcctaagagtggccctatctagggctggggggttgctagagaaccttgtgggcggcccctgtgcagagggaagtaccttttagcctggtgcttccctgcgtgcgcccagcatgcttctgtatatgtgagtgtctcctctcttagtccccgctgctgaggttcatctcatggaagaagttcttctcatcaggtgcctttctgacaccttgagtggggccctggaccaggcccatgcagctggctgtctcctcccctgccacccgttcttccagctcttccctccaaggcccattagtcagaagaacagccttatggactgaggctcagaccactcactgcccgtttatctgtctgtccacagggtgtgaggagctgctgaaggacgtgctgtcggtggagagcgcagggaccctgccatgttctccagacatcccagactgtgtggagcaggtaagggcccctgcctcagcgcctgctgccttccgccaccctctgcatttgcacctgggctcagctttggaaggtctggaaggactgggctttccactaatgatcttctggcatcaaagtcaaaagacagctacaggattgctgagtaaggtagcacctgcctctaatcgtaatcctcaggaggctgaggcagggggactgccacaggtttgaggccagcctgggccacatagcaagactgtctcaaaataatcaagaaaagaaaaaaatatcactttggaatcggtacagtgaagcccttaggaagtctagtgtgtacacacacacactaaatatgtaattaattttttttaattttaaagttagttttcataacccagtctctagcccctccttccgtctagaggtggggagttagaggggctgagagtcccaagtgtgatatttctgtgaccagcaccatcatggggcacctagaaacaccctaagtcatctcagtgacataaactcgggtgtgggtaccaggcagtggttaggcagaaaagccactcctttagggaaataacaaggcctccagagctctgtgcctctttgcatcctgctgatgtggtaaatgccatgaccagaaccaagttagggagaccacaacccagtaccagcagtcgttcaaggcagggatctggaggcaggaagtgaagccaaggccatggaggtaccctgcttgctggtgtgctctctgcttctgttgagctagcttggggacagctgccctggactggaccctccaccatcaataaataataagctgtctcacagtcgtgcccacagctcaatctgatggaggcaaatcttcagccgaggatgtccattcttcccaggtgtgtcgggctgacaaccaagagcagccatcatagagaccaccttcattttgtatttgcatatatccttggctttagttgacctctagtctccccactccctctgctcctcatactcacagaaaggttcctagttacacgtgttccgttattgcctctgcccatttcccttaaggcctctcttgtccctctctagtttcctggcttctatacacattagcttccacataaatgcacagagtgtgtgtgtgtgtgtgtgtgtgtgtgtgtgtgtgtgtgtgtgtgtgtgttttaatttattctgctgttatcgccaaatgatctgtttataatgcattggactgtttgcaagcacagctgtgtaccacagagacagtttaagttgcactatccacagtctccagggaaccttccggctggatgaggactcttttggtttctcacccaagtcagctccaaaacccctctggctctgggtagtccctcatcctgaggccacctccctgagaaatggaagaaggctagagccatagtattctgcgtggtggtgtccaactgggcttcggcagggaggaagctatatgaggtgtctggtaatgctgagggtggccaaacagaccgtgtcggagaaagctaaggcactatcaagagacagaagtgtatcaattcagttgaagattgcagttatgcgggctgagtatatcctggtgttagattatttacctaggttctcataattgagcctgatcagattgagacatacttgcaacaatggttctcaaccttcctagtactaggaccctttcctcatgttgtggtgacactcacatccatgaggtcattttattgctactttatagctgtaattgtgttactgttatgaattgtcatgtaaatgcctgatatacaggatctgatatgtgtccccaaaagggtcagaacccacaggtaagaaacactgacttagaagattaggaaaggccattcagggtgggttggggagggtgttttcagagagggttaactaaaaggagatgtgccctgaatatacaggccccgccatcctgtcagacggaatgaaaggacaagaaagggaaaagtcggtagatcaggttcaccaccaccaccaccaccaccctgcccttccccaccatgaggtatgacgcttctaccacacattcctactgccgtgttactctgtcttacctcagtctccaagcaatggatcccagtgagactctgaaaccatgagccaagataagttcgtcctccctccctccctccctccctctcttcctcgagtccttcattgacaacaggactaacacaagatctagggcaggaacaggacagtgggttttgtaaggtgggaacagtaacggatctggtcattcagagattcaccatctgacgatgacttaattctaatacaacagggtttattaaatactgaccggggagctggagagatgactcagaggttaagagcattggctatttctccagacgtcctgatttcaattcccagcaaccacatggtggctcataactatctatattgaagtcttctggcttgcaggcatacatgtaggcagaatgctgtatatattataaataaattaattaaaaaaatatactggccaagaccattcctgagactcaagctcagagaatggcccccgaattccattagtcaggagtttataaaggcaaaactcacgaggctacaaacttcctgcctttgtccaaccaggggcaggcatatatcctgacgtacttcctgcctatgtacctcctccgcctacccatgatcaagtgcatatcctgtgcagttggggcaaccaagcttgtttacagaagtgaaaatgtgtggtttgttatcgtacataaactacagcatttcaggaagttatctgtccttgagcaagtggaccttacaggttacaggcttttgttttgttttgttttgttttgttttgttttgttttttagagacagggtttctctgtgtagccctgactgttctggaactccctctgtagaccagaacgccctcaaactgagagagatccccctgcctctgcctcctgattaaaggcatgcactaccccctggtgaagcatttctgctttatatttctcttaagcacagtaatttaaacttaaaacatagtgttgctatcacaggaataaagaaactgaataacaggaacaaaaagctgattggccagcatcaaactgctattttgaaagggttaaggtagcaggagactcccttaccgtaccagctaagaccctcctgatttccacatagcagtttagtttccgtcttagtggcacgagacactgtcatgagcaaggctctttctgtccagtctgcttagtgcagatgcctgctcctcacaaagggaacctgtaaattttgtctaacaatttgaagatgacagagactaaacgtccagccgctgtggggccagggtacaagtctggttccagactgtgctcagcttgagaaccgttaggggtagacctggataaccaggctccaagtgtgtgtaaggccagcgctgagggctccagaactgttttactgtgtccggtccatgaatgcattcaggaccaatggaaccagacctgggacagagaacccccaatgtggggctgacactaagtggccctggactctttttgggcccagcctttgtggagggtgcagaatgagtaggcggtaccgtcatttaaaaatgggatccgcacctcactaaggccactgactacccatacaacttcagcaagttcccctcaacatctcagaacctcagttttcttggccaaaaagcaggacttgcccagccaggctaggtctgatttaatgcaaggacaaatcagggatccacaatcatccgagtctctgcatccccttcacccttgaggtccaatgtttcaaagacatgtcaaaacgaagcttgcagtgagaagttggagaacagagatgcactgaggccaagaaccccaggggtacccaggagcagggacatgttccatgggctccagcagcttccgtggcatccgtactgtctcaaccacagccagaaaagatggtgcatttagcaaagaggggaagtaggctcggaggacctgaccctcaagagggaattctttataagcaatggtcttgttgtattgttttcccaaaatccagaggtcccagagaggcagaaagacggagccagcaatctcaacaacctggctcttcccgtctcccctgtaggactgtagaatgtgactgtgagtgttatgcctcttccaggaagacaaacctcttcccatcctccacacagctctggccagagcacccactgaggctgtgtattcctaggcatggcaggtgacttggtttggcttagtcagatagcttggtggacatgggccaattcctgcctgtgggctcctgagtgtccctgagccatccaggcagagtgaatccttagaactcaccggaatcccagctcctggaagagatggagcaaacccatagctcatcaaagtcagaattccgaggaagccagctagaggcagatcctaatgctgtggaccaggcacccagcaccttgctgtgctccagctgtcccctagaggtcagtgtgggaccaagaagccagccagattctggttcttgtggggggggggggggttgcagtgtgtctccagggagtacagatctgagcctgggattgaggaggtagagaatggcacacagctggatgtcaggactgcagctgagcgccctcagtggagggacgtgaacccttcagggtgtggatgtcacttgcagcttgtggcttgttgggagtcaccttgagactataaagtgctttcctgttggctgtaggatacataggcttctgcatctgttcctcttccaggtcccatggaggccggtgctgggcaccacaggcctgggcaagtccactctggatgtttatttaaccattcctgtgcagcactagatgctgactgtggggcatacccttgtccccagagcctggcacacctgttggggaaagtgtcactgtgtgttgctacatgtgctgttgaccatatttctcagttcaggaaatgttggtctggtgagaggatgccagaagatatccagggatggtgtctccaggacaagcttccaccaccaccacccccaaataccactccccagtctgctccaagggctgcctactggcttcccttttgtgtggccccccagtccctatggtaatgagagctgtggaggaatgggcccatgggcatcaaagcaagggcatgctggctaggggctgtggccacccatgtcaagcagtgaggcaaagcctaactatgagaatctgggtacctggtcatccacctatgtgggaagattaatagggaacccatcaaaccagaaggcagcaggtcacctgctcctgctgtgtggctgccagtgtaagaatctaatgttaccatccatctaaagatgcccaggtcaaagagtcacccgtggtacccttatacgctgcagcctcccctcctgtgctcttcataattctctttgtcacagctgctgtctccccagcctcctagttccccactgttctctctccggaacccccaccacagccacagcaagtgtccctccccccaggaggtgaagtagaacctggggtcccacctgcttctcactgtagcatgtctcacaccctaaaacttgtgacgtcaaatctctcctagtttgtttaattttattgtgtcaacatgcatgtgtatagtagaggccaaaagaggacatgcagtgctgcctctatctccctgttatccctttgaggcagggtcgctcgctgaacctggggtcaccggtgtggctgggattgtgtccagtctgttccatgggtgttagcatctaagagctgaacccagacctcatgcttgaacagcaagcactccccaccgatgaccgatctctccccctcccatctacttacattatgggaaagccgtgttctgtctcggttctgggcctttgtgatgtttgtctttcttctgggccatctgttctgcccactgattgtcacaggctgtctggcatttctttctctgggtcccctttgctccaccctagagaaggatctgcgctgggcctcctggaggcctgggagccatcactgctcagtcttactctccagaaggttccattgtactgtgggaggcagtgatgacagtggcagagcccctttgagctcctctccttcacagcaggcagcacctgtgtcctcggggtttctctaagcatctagaagactagatatcttgttgctattattgcttggagacagggtctcactctgcttctaccagtttttgaactcagtgtgaagcccaggctgtcctagcactcactatgtagcccaggctggccttgaaataacagtcacccttctgcctcaatctcccaatcctggtattatagacacgagccaccaatccagcttaatatacatctttcgagctagagagatggttcagtggttagagcactggtggcacttccagaggatccagatttggtttccagcacccacatgacagctcacaactatctctaacctcagtcccggacaatccagtgtcctcttcctacctctgtggccactgcacgcatgtggtgcacatgtaaacatataggcaaaacatataaaataaaatttttcaaagtagatttttaatagttttgcattttttgtttttaatataagaagccaagaagactgtactaattatattttaccaactataccaaaactgtataatatacaagtactgtttactccccgtccccaaaccttgatatcctgcagtctcctcctcccggctttctccctcccttgttccaccaagaacaactcattaccgcttgttattctgtagtgttgacacatatactttgctataatcttgagaagtaacaaatgccatgcagtaatcatgcttgtgccttagtctgtcccctgacagtagccaaatactctgcaaagctacagtaagcaaagaggcgtggccctgtcatgagaatgggcagccagcgcaatagagcagaacagagagcccagaaataagtccacatattggcagccaacctcgcctttgacaaaggtggaaagagaagtgactctgttttatgacgctgagaaaattggatagcaaatacagaaaaaaagaagagtagacctctgcccctcatctcagatggattaaagacttgattgaaagcagagagacacagatggagaaatttgagcctatcaagaattttttataaataaagttttattagaatacaagcatgtccgtttgataaatgcgttctcaccctaacctccaacccaccccctttttgagacagggtctctctgtttatttagccttgactagcctggctatgtggaccagaggtcagcctgctctacctcctgagtgcagtaccacacccagcccttctgactgttttcaaaccatggcagtggatttgaattaaaaccagcccttggtatccgcagaggattggttccaggaccagtaaggacacctaaaccccgtgggtgctcaagcatcgggtataaatggcatggtatttgcatgtagcccagtcataacctctcatgtccctgttatcatctcctggttccttgtaatacctaaagcaatgcagatgctatgcaaatacctaccatagctcacagtttaggagcaagggcaaggaaataagaaacaagtccaggtatgttcaacatggctactttgtcattgctctgttggctgttgtggcttggtgctgggaaccatcttgaacctagggcctagcatatgctaagcacagcccctcccactgagctacacctccagcattttgttttctgctcatggttggtggaatgcgatgcaggacccaaggagggagggagggagggagggagggagggagggagagagagagagagagagagagagagagagagagagagagagagagagagagagagagagatagatatgctgcctccgagtctgaatgactgcaggttctgaaataggtgccaatgctttttttagggaagagttgttttttgtttttcgaggcagggtttctctgtgtagccctagctgtcctggaactcactttgtagaccaggctggcctcaaactcagaaatcctcctgcctctgccttctgagtgctgggattaaaggcgtgtaccaccacgctggctccccatgagtgcagactgttcatttaaaggacacaaataccaaagctcctgatacacccacaaatccctctctgaggagtccatcaagattacattagatcctttaaaaaaattcttatttgtgttctgtttatgtgcatataggtgtgggtttgtgcacatcctcacagaggccagaagagggcattcaatcccctgaaactgcagttacagttatgagctgcccaacacggatgctaggaaacaaactgtatcaaaactgtctgtaagacccggtaccaccttctgacccctgcaagtaccaggcacatatttggtgcacatgcatacataagagcaaacacttttacatacaaaagaaaaataaatccctctctcttgggctattgggatacctcagtggctaggagtgcttgccaccaaaactaccagagatttaccactgggacccatggggtggaagaggagggccaacgcctccaagtcaccctgaagcccttgcaagcttgtgtttacacagccttccctccctaacacacacagtccaatacaaatggggtttggtaaggaccaggactttatcttagaccccaaatggcttccactcacattcagagattttgcaaaacccatcttgtcagagcaggtctttctatcctgtacccagcctgagaacgcttcaggaccctccatccaagaccaccatcccttcatccatccacccagaaggaagcattcttgaggctgattatgacaaagtgcacttttcagttctaagaatacttccttcctaagagacagtactgcaattctacagagcttggaggttcagggtggcaccctgtgtgcatagtgtggcgatgactggagagtttgtagctcaggaggatccgcccttaatccatcctgcttgtgtgtgctccctccaaaaggaaaaccccttgctttaacctaaggctcagagcttctggaagaacatcctcgggaagtggttgaccgctgagcctgaaggctgagcagacagtaggtgctgaggaggccctctccattcacctcctctgcctgggctcccccacctccaagctccgactccctcaccccaccagccagcccctcacctcctgccctaatcagcccctgggaagtctgggctgagctagcctgaggtacctccctccggggacagcctcaccctggtgctcaggggcagggacatttttatggggtagccttaccattgcagggcgccaggaagctgtagggagtgggcaggcgcataggttccatctttcctgagcctggcagggttctggttttattagccagaactttctcctgtaaacctgatctctctactgccctcccctaccagtgagttaagggaatctctgacacatgtgggaaaacaccacgcaggtgtgtgcactgaaagaggttagctttccaaaacaccgcaggctaagccagtgttctcaggcctggctgcacagtgtaagcatttgattaattagttctctctctctctctctctctctctctctctctctctctctctctctctctctctctctctctctctctctctctctctctctctctcctctctctctctccaggtaaccgattcttatacaaatttactatctaaaccagtgtcctcaaggtttgggacaagttagaatggcctgttagcttgtaagagtccccagactcaggctgggcctctgacccaggaaataattccatgaagccacagtgcactggccactctgcactctggcccattccttcaatgctttctctgagtctagaagactggactgggaagaagggaccggtcccttgcaaacggccactgcctgacccagctgtgcactcacgagagttcctggtgtttttatatttctctgtggtttgatagaaacctggccacagcctgtgattgttcccaagcccaaagcactcgcagtcctatagcaccaacttcatggagtcgcagttaaggaaggaagcattcctagtgtgcagtgagccgtggctcaggctactaggagtcactgggatgctgtatcctgactatttaatttaaagtgttttcaacttttggaagaatgataagagtaaaacaaatgcatttatttaaacacagcagttagcatgttgcaacatgtgtgtgtgtgtgtgtgtgtgtgatatctggtttgtttgtttgtttgctttattttttattttatatacgttagtgttctgcctgcatgtatgtctatgtgaggatgttggagtctctggaactagttacagagagttgtgagctaccatgtgggtgtttgaaattgaacctgggtcctctggaaatacagatagtgctcttaactgctaagccatctctctagcccttgcttgtatgttttattgctggggattttgtttgccgcttttggtgggctgtataaaaatcagttgcaaatataatgacatttgactctaaactttgttatttgtatgaggttggatctcatgtagttcaggctagccccaaattcactatgtagaagagggtattcctgaaacagtgatcctcctgcctcctcctgattggccttgatctttttttggagggggggtgttgagacagagtttctctgtatagccctggctgtcctggaactcactctgtagaccaggctggctttgatctcggaaatccacctgcctctgcctcccaagtgttgggattaaaggcgtgcgacaccactacccggctggccttgattcttaaagtcttggtggtcccttagcctgagggccctctctcacataaccacaacagccttgtctctttcaggaaatttaggatggatgcaacatattatctaatttaaactgctttcctagttcccaagtttctagcttctggtcccaacctcagacctaagccagaaacacacagcattttcaactgtcgtgtctccttagcagcctcagcctagactagctcctgagaccttccccacgctcctttgtgccaggtgttcagaattatgtcttagcaaggccatacctcctcctcctctgagctgagttgaaaatatcaaagtagcttacagaaaacttaaggcagggctcctaacagggacctccctgtgtctggtggcctatctgaggtagcaccggacaagatgcaagggtctgtgtgtgacgagtgatggtgcctttgcagacacatgcctgagggtggtcccagcccggtgctgtgctctttagtccactgccctcctccaccctgactgcacctcgtaggctccccatctagctgctccaaggtcagttgccattaatgagcccatccttgcttcctccctccctccttcctttctgtcctcccttcctcattgacagcactgcgaaggcctgtgggtttgttctagaacatgtcttgagtctcctgagcctttctccccacccttgcagaacctgaagctgccttccaacccacatcctacaccctcttgcctttctaccgcaaaccttccatacaactgccagaattgtcttctaggtccttaagtcaggacctggaactcgtcgaggggcacagaagcaggagacccagctcccctctgcccattgcagcctgaagagctcccctgatcttttaagggcctcacctcaggccaaactggaatgtgcgactttgacatagacatggatttcaaggtaggccggatgaagcagagttgatctttttactataaagctttttgatatagattttaaccgtgagggttaaggaggggaggttgcttagaaataaagacagacacaccagagaacacagctgtgggattctctgagagagacttacttcatagtcttttatagtcccaggtaggactttggtgagatttgagactattatcttcaaagggttgcttagaaacccacatgagatcacaggatggctcctgagtggcacctgatgggatcatactcgataaggttgcagagatacaaggaggtaggctgtcttcccggcaagcaaaattaactgccttgaaatccccagatccttgggaaaggagtgaggccctacccaaggtcataagcatacaggccttagaacagagtcactgctgttgacatcaaaggtccacgtctgaaagggacagtgccatcatgccagcaactccacagcacgtgttaattgtgtgggacttttcacctctcagatggagcggcctcagccagagcaaggggctcctctctaccatgttccccagaatttcccttgtccttccatccttcttcagcatgctcttgcttgagaccttcccatgctaaatcttcctaacagagtcctaggccagagtcctgacttccttcacctgcctgggagagcaaactggtcggagagacctgctggaaaggctggatgcaggcttacaggacacagtggagagcaagcaccaccccccaccccctgccccactgcaggatgctgccctgagatgcaggcttatatagaggaagaggtatgatagtcagactggcagttagtcactatcatggctcctgctctgagagtggttccagaaatcaccccactgttgctgagatcagtcaggctcctaggagaccattgctcctgcgtagcagggagaacagcttccgtttccgtcatgggggcggggaggggggagcagtgttctcatcatggatgataagtctgctaggatttttctggaatccagactgagggcatgactgggtgctactctaggagtctggaagaggacaaggaaaactccgttactcttatcttggagacttcagcattgaagggggcagggaaagttagataacataagggccactcatccttgcgtcactagtgtttggtggcattctgtgtgattaacaagctcacgggcagaactgagcagaggtctgaccaaagttttaaggccaaggagacagacacagaatgaaagccgagaggccaggaattctcttgctgttaatcccatgtgggcctgcaggtctaagtgaagtgatggtgctctttaaaatggagccgctaagcccctgtcacacacaatcttgttagaagaaagtcctaacttctcaccacaccctatgggatttcacctctgcctgaatttctgccctggtccctgccacctcgcagggttcccagctctcctggccttttttgtcttctttgctgtctataatttgctttccactgtagtgataaagaccacggtcaaaagaaactcagagagagaaaaaggtgtattttatcttacaacctcgggtcacactccatcagtgagagaagttggggcagggactcaaggcaggaacatggagccggaacagggcagaagtcatggaagaaagctgtttactggcatgctcagcctgctttcttatacacatcagggcggcctgcccaaagatggcaaagcctccagaagacctggtcttccctcaccaattattaatcaaagcaatacctgcccccccaccccagacctttctataggccagtctgatagaagtattccttcgtcagggatatgcctaggtttgtgtgtcaacttgacaaaaaccatccagtgcattccggtgattctcctacccaggaccatgtccctctaccctaatcaggtaccagcaccagtgtcacctcctctaggaagccttccctgcctgacccttggtcacgtcaactacactgtgcaccgtttctccagtccctcttgtccacatctggtacctctccagggtcactgagtgtgtgcctccctggttcacagatgctcctgggacacatgggctgggtggatgaataccagatgggaagatcaccccaggtgacaaggtcaccccagatgggaaggtcaccccagatgggaaggtcacatctgggctggggaggaactggttcccacctagaaacccaggagcactaaggaaatcagttcaaaggcctcaaaattcacactatgcataggcacttgggaaagaaatcataaaactggaggccctgagcccctcccagctacgccctggctctcatacttttatctcgcacaggaatcccctgccttttttgatgtctctaatgacagtggccgcattgctgcctaagtctcacctgtgcctctgtgatttgaaggtgctttccctggcctcaccttaaatgctgtagacgccacgggagcagtccctccttgctgcctctcttcctccatccaccagtgtgtcctttccagcctggctgtcactctcacctgcagtgagggccacgggattcctgtcttcacatctgctgctatgacagacaagactggttttctgccaggaactgtgctcagcctctgactctccctgtacgtctcagtgaactgctggggcatgtcacatctgccctaagccaggccctgtcactgccagggatgggaaggcggtgcctgtgacccagttgatgctattgatttcaggaagtagacagatggaagcccacttggctggtcttggggcagagttgatccttgtttgtttgtttgtttgtttttcatatggaattcttcagagatgttcatgtcattcttgctcaggggccctgttaattttctgtgtatttttgcagtgttagtgtctgtgctgtggaagcaagaattcatgttgtttatttgagatgaaagtctccctgttgtccagactgacttgagcaatcctcctgccttagcttctgaagtagctgagactacaagtatatgctaccatgctgggctccaaattgtgattttttatatatataaaattttttaaagaaacatttatatttattacttatttatttgttacttagtaagttttttgagacaggatctctcacttatgtaactctggctgtcctgggactggatccaggctgccttgaactcacggagatccaatgtaagtttctctgaagcattgggattaaagagtcacaccactatgcccagccaatttatttctttttatttcacgtgtctgagtgttttgcctgcatgtctgtgcaccacatgtgtgtagtacccatggaggccagaagagggcatttgattccccggagttgtaatctcagacaattgtgagctgccatgtaggtgctgggaattaaacccaggtcctaaggaagagcagcaagtgctcttaatcactggagccaagtctccacccactcaccccaaattgtaaaattaaacttgagagcaaggcattggggcccgaggatcctgggttcacctcttgatcctgtccaatactagtagggctgatagcaaaatctcagacttccacctgtgccacttttcctgcactaactgggagtggtaactggtgtggttctccaggaaggcctgctaacccagcagagcctagaaaatgctgacatctcaggctgtaaaacaagtcttttgttcactgataccttttgccccaggggtgctgacctcccgtggtggccaagcccatgcttctgatctctactcaaaggtccccacccctgtcatcaggggtcctacctaattgggaaactcagctcaaggccttcctgcagggtggggactacctggtcccagggcaaagatgtttggaaggctccctggaggggaacacctgagctccttccaatccctgccacgttcttgaccaggaaaacaaatatggctgaaatactatgataactatggctgaaaacaaatatggctgaaatactatgataactctggctttttgttgggagtatgctgacaccagacccagggtctctggtatggtaatggaagcactctatcgcaggctagcccctcacactaggcaggagactgatcctgtgtggaggagaaagaatgttatctttctctccctctatctagagcccacaaattaaactaacaaaagatacctctcaatcaatctctctctcccttcccctcccctcccctcccctccccttcctctggtctctttgtgtgtgtctgtgtcagtctctgcctcttacccccccacacacacacatacaatgtaggcctgagactgaagacccacatctttgttcttctcttcctgacacaaatttacaaattcatgttgttgtgttcctcctcctcctcttcttcctcctctttttttgatttatatttcttactttttatttttctcccttcctttttcgagatgaagccttactgtatgtagcctagcttctaggcttgagctggctggaattacagtcaggagccgaaaggcctgcttcaagtctgctttatggagggagatgtgtgacctgctttcccacacatgagacagcagcaacttgctcctagtgtctgctatttctctgttgcctttaactcaaaacaatcctatatcggctgggcatgtgacacatgcttttaaccccggcactgaagaagcagaggcaggcagggggttctctgagttctaggccagcctggccgagagagagagagagagagagagagagagagagagagagagagagagagagagagagagagttagttccagaacagccagggctacataaggaagccctgcctagaaaaaacaaaacaataataatcctatgtcaaaatagcctatctgggggtgcattttggtcctctcaggtccctgcctcagtctccctcttaggcccttcatacacacaggcacctccatgtccacctgaactaagtctcttggtccaacagtgagggaagcttagtgcctgaccaccccctgctctgaggtcttcacaggggctgcctccctcacagtctttgtttgtttgtttgtttttctttttgttttttcgagacagggtttctctgtgtagccctggctgtcctggaactcactctgtagaccaggctggcctcgaactcagaaatccgcctgcctctgcctcccaagtgctgggattaaaggcgtgcgacgccacgcccggcctcgctcacagtcttgcctccccactacactacagttactcctttaggccttactcttctaaggtgtgtgatgaggagggggggttctttgtttgttttgctttacttttttttgtttaggtttacttattttaattttatatgtgtgagtatttcatttacacgtacgttcccatacctcgtgtgtgcagtgcccaaggagggcagaagaggggatcagatcccccagaactaaagtcaggaatggttgtgagccaccatgtggttgctgggaactgaactcaggacctctagaagaacagccagtgctcagtggttactgagccatttccagaaggaagttcttaatctaagctaaagtattctaagacagtggcaggttggagctgtactgccagtgttgggctgatgtagggcaggtggctgcccttccctacctgcagggcccctgtcctgactgtgggcgggagcttagctccaggagacttggggcactcagcctctgggaaaggatagagcctctctctttagagctcccatctctgtcctgatctcctgctccaagcttggttgtctctcgtctctgtgcccattcccaccacgccatgtgaagcgccctgagtgggagccttgggaactccctgagacctgtcactagagtgcatttgtgatctgtactctgctcaggatggtctccgggttttgcaccaggtctttcctcatggaatgaaatctctgtcagatgaggagaatcactccagctaactcgaactctccctggtgaggcctgtgaatgcacgcgctgtctgtcagtgtggctgttgtcctcctttgcctctgtaggttatttctatcttgttggtccaactctgaatgtgtcttttattgtaaataattatacagatgtccaactctgaatgtcttttattgtaaataattttacagatgtcaggaaaaaaaaaatccacaatgaagactaaggaaggaaagagacactgtattggaaaataagtcggaagtcttcatcaagggaggggctgttgccatagggatgagactgcacccaactggcatctgccagcattaccagggccagctggattttggtttggggatttgggtttccttttgttttggaagctaggtctcaagtgggccaggctggcctggaactcactttattgacaagtgttttcttttaaaactttcttttgtaaggtacatacttttattaagactatgggaccctcggtgaatttttgtatcatcctcgcacaggggccgtgctaatctgctccgtattgttccagtgttagcatgagtgctgctgaagagagcacctaaggacagtcctgagcaggtcctcttccctcccggcctgggtgctggaattagggtgccccagagcttcacagaggctgggcatgcgcttcactcccagccagcttcagctcctataggatagaggtggccccagatggggtaggcggcagagtcacagaacaccgtgtccctgagactgacttcttcaggcagtgggagtgggcttgtcctgctcaagaatagttccagggttggggctggagagatggctccatggttaagagcactgactgctcttccagaggtcctgagttcaattcccagcaaccacatggtggctcacaccatatgtaatgggatctgatgccctctactggtgtgtctgaagagagcaacagtgtgcttacaaacattaaataaataaaatctttaaaaaaagaatagttccaggtaaagaatgcgtttgaaggttggaagtatggagcctactgtcccctgcttgcaccctttgcagatgcaggaccagccttgctggagctctgttctgcccagctgttccatgtttatggactgaaaggagagtgttgctagagtgtggggctggcctatccctaaactccaggaaaggaagggtccctagcctatcatagggccttaccctgcatcctcgagagtcatcctcatggcctggcttctagcaatcagcactgtgggcccctcctcctgacaatggcttcccatttccaccgtgacaggaaagacaggggttacctcatagtcctcaggagacccagatggattgatcgttcagggctgtactcctggaagaagcaggacagggcctagtgtccatttgctggctggcctcactaggcaaccacacattttacactatggctgctttctcttccttcctccctcccccagtctcccatccctctccatcccgtctttctgctgtttccctctcagcatagggcaccttcccattgaagccctgtcttggcaagaggcagacacagggtggggtgggctgttggaatgtttgcagtgtaagccaggtactcacactttccatggccaatttctctgactgccacccatcctttctgcttaggctatatagcccgttgtgcccactgcattttgaggaatctgaggaatctcaggcacttgtctgagagatttggtgtgcagtgcctgggttgtcactcgccctgtctgcacccaggactcctggtagccagctcctttctacttgccctgcagcttctctgcatcccaggcctctccttgcactctgtccccgcctgggagaaaggaacagctgggctaggaagggcttgcagagcttgtcctcgctctacaacctaagcatcacaggagacccacagggtaaatgacaagggagaagagtgtcccccccaccccacctgagcccccccccccccagcctgctttgttggcattgcctggacaaaggtcctaaccaggagacttttgtctggctatggagcagggaactgtgaggtgaatataaataagaaacactccagaaagggagcgtgtgtgtgtgtgtgtgtgtgtgtgtgtgtgtgtgtgtgtttgtgtgacacacatatggaggtcagagggtaagctgagggagttttccctttccactgtgtgggtcttgggatcaagctcaggtcttggtggcatctctaatctgctgagcctttgtgcctctggatttcaaatgactttagggactccccattggggaggaggtaccttacccaccttattggctcttgggacccctttcagtccagactctttgctgtagaaatgcaaacccagctgactcagggtgtggtgtgcagtgcatttggggcttatttgccacttcctcccctagaggaaacaaaacttgtgataacagtgtgggcttggtagacagctattactcaaagaccgaaaattgtccccagactcccagtcacgggtgtctgctccccccatcgctctgttcttcaagcccctgggcttcacagctgcaaggaagaactagtctcctgcagtctgtgggaatgccacctgggaacccatgccaccaagcacagcagtcccaggccatgcctttttttatggtcgttgtctggctattgtgacagcccctgtgctgacttcctgtctctagtctgcctcccttcactacaagcatcatccacaaacacggggaccctgggtggaggttcctgcctgtgagatgcgttggctgtgcagcactgggcaaactgcttagcctctctgtagctagaatccttatttgaaaaatcatgataaaatgcccatcagactataactgtttttattgctattagtcactagattctgaccttcaggaagtcagggctatctctggttcatctctgtgcctcagtgaacgaatgacacactaggactgggtgaatatttatggaaaagttgaagggcccggagctgcccctttgacaagaagccatctgtagctcccctgcctcctgactgatatttagtgtctctggcaacagggtcctccacctgcagaatggtgctcctctctctcttagaaggtcccccttctgcctctgctatgtttactgggtgctggctctgccccagcaggttttgccagccctctagactgaccagaagcagccctcccctgtaccaggataccttatctcatatgatgggctgggccttagagcatcttctgtgttttagggcacagggacacttggacctttgaggtggcctcctgtgatccttagagctgggggcgggggcattggaatgattggctgctaaaactcactcctgctctctggccacttttaccttcaagatcaccttccagaaggaatgaaaggcaggtgcttcccccccccccccccaatctggattggatgagtggctgctgcctccccaggccctgccccgtatcttaatcccaaatggggttggggtagggcacttcaagttcacgtgtaaggtacccattgaaaacaacctttgggctgggtgtggtggtacggaaatcccactgctaaggcaggaggttgatcaggccaggccagagcaggtcgggaaacaggaacttgtctcaaaacaacagcagaaagataaaaaagcaactagtctttgggtcagctggagaaggaacactcgagacccatatgtgttgtcctggctattgaaaaatgggcagttcttagtttagggctggctctagagatcgaccaatcatgtctgtcaatccggaaggagggacagggtttccctaccagccttccccacccaataagaccttgagctagcaatctctcctagcctcagcttgtctgtgaaatgggtgccatcttgctgcacccctgggcctgatggaatgattctgggaggttcagttagagccctttcagtgttagccagggagtgctggctcctgacagtgagacatgatgtaagaaatgtaggtggctgtaaagattcaaactttagttccagttcctgttggccatctccacttttctcctatgactatgactagttataggtggtggctttatccctgggactgttttccacagaaatcaagtgatatgagtgagtgagtgagtgtgtatgtgtgtgagtgtgtatgtatgagtgtgtgtatgtatgtatgtgtgtgtgtgtgtgtctgtgtgtgtatgtatgtatgtgtgtgagtgtatatgtgtgtgagtatgtattatgtgtgtgtgtggtatgtgtgtgactgtgtatgtgtgtatgagtgtgtgtatgtgtgtgtgagtgtgtgtgtatatgtgtatgtatgtatgtgtgtgtgagtatgtattatgtgtgtggtgtgtgtgtgactgtgtatggtgtatgagtgtgtgtgtgtatgtgtgtgtgagtgtgtgtgtgagtgtgtgtgtgtggtgtgtgtgtgactgtgtatggtgtatgagtgtgtgtgtgtatgtgtgtgtgtgagtgtgtgtgtgtgtgtgtgtgtgtgtgtgtgtgtgttattttggcaggcattagccagtggaactatagcaaacagcactatgttgcagcttccagctggagcacactctcccttccctgctacttgctgctcataagctccccactaccccagtctttaacagccttaccaccaggttcttggtgtctctcccccctcccctggcctgccactcccatcccaggagtacaggcagggcaataaaacccctccccagcctggcttggttcctgactcacaccatccattgatcatacctccagtagcctcagtttccccatcaagaagcacagagcttcagagcactatgtgacatggggtacttccaagcacctgggaaccaagagccaggagatagactggtttcctcagcacagagcccctcagagcttgacaaaccaagaaccctcaagaagaacacggggtgctacaaaatttgcactcagacttgaccagggaggccattcttttctcctggaacacactttgggacattcacaggccttgctactcctctgtggcttgtgtgtgtcctggtagctgattagaccacccagtctgtgcatatacaaattcctacattctgacctccaggcgatttatgcttctgcccagtctcctgggcaccccagtaggtcacatatactgggttcacctggggagccttaaaacctccagatttaattgacctgcagtttcaccagtcactgggagtttgccaagctgccctgatggttttaaagtacagccagctatatggatgggtgcacaccagacagggttaggcggatccatttgaatttgaaatcttgaggaaaacaggggactgtctcaaggccccggcactggctggttgcaaggcctgaaccaggataaggcgcctgcagttctagctggtgtcatcactcaccccacctcgtggcctggaacgttctccttccgagcctcagcttgtacgtgcgtgtgtcgtgtggggggtggagtccacgtgccacagtgtatctgtcaagtcagaggacagctttatggagcgggttccctccttccacctttatatgggcaccagggatcaaattcgggtttccacgtttatccagcaagctctttctcctactgagccatcttgttgggatcctcagccttagccttttgaccccaaacaagagccttggttgagcccggtcctgaaaccagctttgtacctggcccactctactcaggattctaaacgacccatccccaggacggaaaagcccaagccatccgggaagggaaacaagccatcagggcttggtcctgttataaagcaagcactctcgggaggacgaatcccagcctggccccttgtgggctctgctgccttgccttacccttgatccctaatgcatctcagtttcctggcttatggacgggcacagtggcccatggccctgtgcagagaaataaaggaggtgctggactcttggctggcatcgtgtgaagttgctgggggctcttacgttggcagtgatgcaggaggcctgaggtttttggctgcctggagagcaacattccctgcactctcccttccctggttcccttgctagattccccagcctggccgctatcccactgtcccttcatgtgtgtgactgtggctaggaggagccctgtgtcctgtgctgccagtgtaggggaccagataactttgccagccacagctggtggcagccttcccaccgagtgggcccactcctgacggggcagctgctaccgtcagggttggtttatttttattcctccctctagagcctgtaatcaaagggcagtatcatactgctgcttgccacggggaacagagatgacggggtgttattcacagccaggccctgggaatgggtcagtggctggcttacactttcatctctgagggaaacggaggttgtagactcaactccttcaaggttgctcccttcagctctgctctagatcacgggtcttcccctggccctatgacagctgtggtaagggcagcattaagagcagcaccccacggacctcacaccttggccagagtcagctggctaagtgcagatggcaggccacattcactccctcctctccccagtcctgggtagatctgagaatcagaatcctaacaagttctctggaccaaccacagatctagacactgctgcagagctgtggacactttttctcctgtgccagttcacctcccagggctcccagccctgaccagtcagtcggctttctttcggctttcggtctcagaagcaccgacagtcctgggggagcaggcagcaatggtcacagttagaccacctggttcacagtccatatctttgtctgctgcctcctgttctgtgacttctgttttctcacctgcgggatgagggtgagaccggctccctcctgtgctgttaggcaggttgttaagtcagtgcttatgctagtctccagcacacagagagcatcatctcacaggtgagcagccgggatgtaactcagttggcagagagctcacttagcattcatgaaccccccagtttgattccccggcatgatataaactacgcctggtgcattcggagggctagagagggagcggcggggggatcagcagttcgaggctaacctgagcttacgtgagatacctactgtaaaactttaattaaaaaaaaaaaaaaaacttctattttatgtatgggtgttttgcctgcatgtgtgtgtaccacgtgtgtttgctgtgtttgtggagcccagaggagggtgtcaggtttccctggcactggagttacagcactttgtgagctaccatatacgctctgggatcaaacacaggacccctgcaagagcaagtgtcctcaacctgctgagtcacctcccgacccctaaaatgataattaaaaaaaaatacatttatctatttattttggtgttctgagacaggttctgctctctctggagcccaggctagccttgaattgcctcagcctcctgagttgctaggaccgcacctgcctgtttgagcgcattgtccaggttgaaagtgctattgagggaggtgaagagattttcccaaggttacccagccaccgaatggtgaggttggccagccgtgtgtgtgtgtgtgtgtgtgtgtgtgtgtgtgtgtgtgtgtgtgtgtgagtgtgaggtgtgtgtgtgcatgtgtgtgtgtgtgctatcacagtcaatcctctgctggccagctgcagctcagctggtggtgggttccatacagcttgactttgaaagacccctccatactctgctctctctggccacacacacactgtagtttctgataaattccaatcccattagccagtcaggagatgtctagagaaaacaggtggcccgagagagggagcagcaaccctctgcttccccagggtctgaatgtcccctcagggaggagaggccccaggcgaagctgctgccctcagtctagaaagctcggcgtttgttatgctaatgtgcgtcggctcacagaacctccccagtttctggaagaatgcacacttggaatctttgcctttggtctgggcagagtgaacctcaccctctgtctggcgctgggtggatgccatcaggatcttgctcttgtttttgcttctgctcccaagtgttccagaaaagctgctgttcctcgggtctcactttctccttgccttgattctcgcctctgactggttctcatgctgcgtttgcttgagggccacttttgtgagcctgtccccgatggccctcagaaagggctttgtgtcctgtctctctggttgcctgtggagtgtccagcgttgcacccacttcccactcagatctctgtcccagctgctgggcaagggcagttccttggggacctttctctctgctttcatccctgctctgatggagtgggtccagaggtcagtggctgccagctcggggcccattctaatgaagggaactgaatgcctgggccgccaaaactggccctttgcaaaacagtcaagggagagcctgtccccaaggcgagcgtgccagctcttgtttgccctagcctggtattcttagacacggactgggccatggggccccgaaagaggggcccaggatggggaaggcgacagaaagcaggtttatttagggtgagctggtgcctttcatggcatggtgccttcagaaactggaagagcagcagggcacctggggtaggagtcgggctcagctctaacaggatcctgatgccaaatgcttgggactctggacttgggacccttctgatcagaggttctccctccctctccacagaagcccacatagctgcatgctgacccgatccagcctcatgctgacccgatccagctgaccttctgctggatttggaagggctgtgcacagtgcaggcaggcaggcaggcctgcatgtcctctgatgggccaatctttcagagtctcagcttcttaaatctgtgaaatgggaagaatggtgtatactcagctacattcaggttaggcggggtctgaagctctttgcaggcaaagcacagcatcaagtattagtattgcatgtgcacaccccgggagggcctctctcaagctctcgaaggtctaggagttgaggcttggaaaagttgcactgcaaatgcagctagctgctccctgcctggtggaccagggagggcagtgtaggctgactctgagtccagaaacagtctcccaacctcaggcagccttcctgtggtcctcaggccatgtgtgctggtgcagccacttccacctgtccagtagccccaaacaacagccccctcctggcttactggctcgcccatgtttctttccccttggaagggaacttaggttctattgctcccttcctcggaggcctgcaggtacacacaaagagacatgcatgcacgctggccataaaaagagtttagaagcttgaaagcaagcagggagagcccacgtaggaagcccagcaaacagtatggaaggagcaagcctctgctgaaggttcccacggacccagcagaggggaagttgatagtagctgttctgatctgccacgaggaaggaccgacctagcaggtggcctgggcagcatggggacagaggctatgctggccaccaccatgtgttgggagcctgcccctaaatgctccttgtgtggtaagtacttttattcccatttcatagctgggagtatgaggcactaggtagaaagaccaaagtccccacactctgtcactggccaggcagagagcccctcatctggcattcatgttggccacaaagcctataggctgtgcctggacttgggttaaagtcaagtggttagatgctgagcctgaagcagggaaagacttccttgtcggggggctgggtgtccagactttgggtgagtgcttcactggtcagggcagatcttggatgtctgaagagtactcaggccaggtctggtgttgagggagtcgcaggagcaagcatggtggtcacactaggttttggaaagccaacaaccattataaagcttcgtctggaaagaaaatgctacatgatccctctaacctacagaactttacaattatttttaaagggagctggtgagacggctcagtggtgaagagcagttgctgctcttgtagagggagggcatcttgggatgtgacaggtgacatgagtcaagcctaagggcagtgaggctaagaagatgtgaaggcagagcctgctctgctgagtaagagggaacttggctgatggacggtttcagaatccgctgcacacttcagagcggggcctgggaaccccgggggaaggctgctgggcagaaacctgagccataggggcccttgggtgtgtgctaggcctccaggaggccagatgaggacgatgctcacacatgaagagccctttttggcattttagagactgctggggactttaatcccggatggtaacagcaggtgactgcagacacacgacctgctgctgtggggccataggctaagagactcaccctgcgctggtcaccctcagtgagctctgggtgaatgcatatctggttagctaaatgcagtgggaatggggctgaaggacacagcaagtgtgtgtgtgggaaactcggcatcaagcctgtcgacatgttccctttggatgcctctcaagtactggggccatgttaccaggaagtagaaggaggaattcagatctctgtaggccccagcccctcattttcctaccttcaaaagtgtgtgctgtagcaggccctccccagggggcaacccgggctttctcaccaaggaattgcagctacccctggagccacctgccttccattgctggccaagagggattcaaagcttctacctctgtgcttcgtttttggacaacttgaggtgatcatccctactctggagccccgtgagagccggtgagatccctcagcctcctgcctttcttgtactttcaagggtctgatgcctaggacacccctgtggcttccttcaagcggctgggtgtaggggtctggagctcaggagagaggtccaggctgggtatcaacatgcaatgagggggaagcctgtatctccaggggctcaggtgttgaagaatgctgggtcattattcaccgactcagagctggtagtgactttatagcgaacgcaaccgctgcaaataacgataaggggctggatgccgtggtgtatccctgtaacttcagcgctctgggaggctgcagcaggagggccagaatgtaaaagccctgttttaaccgaatgatgataataaaaattaaacaggcagtgggtgtagctcggtgggcagagtgcttgcctcgcatgcatgaggctcttaggtttgatttttagtaccacataaaaccggacgtggtagtgcatgcctgtaaccctgacactcgagagacagaagcaggagaataagagaagtttgggatcacccacttacatatccagtttaaaaccagcctggaattcaggaggccctgtctcaaggaacaaacaaatgagcaggagagacggttcagccacgaaggactgaagacagccaaagagcacacaatcaaagacaaaatatccagggaaatgactgctgtccaccctgttgtccaggttagaaccccacactgagatactaaagtacaggtggccagcagcaggccagctggggctgtagcctgagcagattggataccaggggcctcaccctatgagtgcagccttgtggttaagttgggacagcaggaaacctggcctgaaaacagcctctttgtagggcaacccccaactggccttctctgggctcagcctctccagtttccacctgaacacagtggctccttcagccctgggctgtggtttctccttaaggaggaagaacagtggctcagtgtcccgaggccaggcgcctttggttttcctttgctgagcccaaccctggcagagaagccacaaagagctgtgtgtgtgtgtgctgagaggagaaactagccggtctatctgctgctgtggccttctgtttatccagggatagactggggagggaggcccaagtaagctggtggcagtgggccctcctggagtctctccaggctctctgccttacgggtgctggatcctaggctccggtgcctctgctgcagtcctgggcctgcaagcctgctgagaagatcacgtgtctgctgtggcttgggggtgttttccactgagatgatttgggagacaatttggagggatttgtttgctttcaacgtgggattataagccttttagtgtgtcctaaccagaaaaatcactgtctacatctacccatatccagaagtaggggtgtgtgtgtttcctgagactaatggccagccccctggagtgtcccttgcagaggccttcatttgtgctgcggatgaggcagagaactaggaaggacaggaacatactaaggagtgtcacagcaactcttgggaagacttaagggcagacagagcacatgtgggcgagttcccaagacctggtaagaagtgaccgtgctggacagtggtcacctctggacagctgatggagagcggagggagccgcttcctggcccaggcagacctgaggcgagtctcagctctgatccaggcttgtcactcctttattccccttctgtagtatgggtcctgcagcggcggctgtgtggctggtgaatgtgagcagcgctgtgagggagacacacaacagatcggcaatcattgatggttcttgttaagaatcagttgaggaggctgggtgtggtggtgcgcacctttattccagcacctgggaggcagaggctagtgatttctgtgatcggaggctagcctgggctacagagcaagttccaagccagttgaaacgacacagagagaccctattttggaaaacaacacacacacacacacacacataggaaatgatcatttcttagggcgcagactccacggagcagagggggcctcctcagatctgttctgggataagatgatgggtcttgaagaaggcctctttgataccctcactgtctctcttcaaatgcatgtctcagagctgggcatggtgtctgtcgaatgccttcaccgaggaagcagagatctcagagtcatcacagccagcctgggctccacagcaagacctcatctcagaaagccaacagagtcttaggaactcccccaaaggctccgctaacccacacccggcaggccctctgcccttcatgctatgtgtgtgatcctcagcccgctgtacgcctgacacataaggagttgaaagacaaccggggacatgtccctgctcctcagaaatagcaacctggtgggggggcctaaagaaaggacagttcctcacagcggcagttcttattcttaaagcacagggatcattgtcactttgacaagacaagggaatatttaaccggaggtcacactgtggtagagttttacaggagaaacgggagttttcctaatagccggaaaggaccgcatgtttgataataaaacagtattcccagtttgctcctagttgtctctactactctctgtgattatgggcgagccttttgttgttgttttaatgtaggcttcaatttcccacttaaactgccaccccttttgggacagttcatcccccctcccccacctcctctgttctggaaaactggagcttgaacccagggcctgcacatgctagggaagtactctgtcctgagccacacttcagcccttggaggctctcagtgaggggaagttacactcgtgtgctccgggctgttgtgcaactgagccaggcctggggactgctcaccgttgctccccaaacccaacaccccgtggtggcgcacggagaaggtccccgaggagccgcatgcccggcctggccctgtggtggctgtggtgatgagaggcagggggcttgaaagtgaagcctgaggtgtagaagcctggtctctgccagaattgtagctggtgggaaagaggctagcgacagacagcccctgatgttggccgagtgacagctttccaggtagcaagcaggtatactgtgaccatttccagaagcaaagatcgttgcttgaatcctggagctgatacgtcttcacaccctagtgcctctctatccctcccccttcgctcctcctccccctctcattccaatatgtgctgggttttgctgttactgtttttgagctagggtcttccgctgtagccctggcactcagtgcgggccctggctagccatcatcattttcttcggagcccgtgcttgctcatcagctgactaccctgatactgccagttccacagcacccagccgagactttgtactgctcacagctgtacccacaagacccacaatagcatctggcacgtagcatgtcttcacccattaggaaggagtaagggaacaagtggtgcctttggccatgaccatgtggtcacgcccattgctgtcagcgaggcttaaagcagggcagctgctacggctttcccgctcacctgaacagtttatacccagggtcacgggcacctggcttcacactgccgcttgtcaacggtaagccgcctgtagacagttgtgggttccgagagagtcagcaagccgagcagggcaggaacgcaagccgagcagggcaggaaccgctgtcttaccagccattctgaatgctctcaaagttggcagtaattgatctgggtggggcgacctatcctgactaccctagtctaggggaaagtgagagtctgggaagagaagtatttacacggccctgggtgtggtgagcagttacctgctgtcaccaatggaagggaaaggaagttccctcctagtcctcccagttctgaatcaaaagaacccctgttcctttcccttccccaggcgcctcttcttgggtgactgcatgactcaaaggtgtgtgtcaaagaggaaacatggcttttctcaccatcatcccctcctgtcaggtttaaatgactaagagaactcactcctgtgagcactggagctataggcccagggtggtggtgtgtgcctctaatctcaggaggcagaagcaggcagttctccgtgtgtgtgtgtgtgtgtgtgtgtgtgtgtgtgtgtgtgtgtgtgtgtgtgtgagggctaactttgtctcatctatatatcgagcttctaggctagctagaattacaaagtgaacccctgcctcaaaaaggaggaggagggagaagcagaaggaggaagagagaaaatggagctgtgtaccctgaagacctggtgccacccccagtctgcacacaatttgcacaggatctagccaggtattaggaaggagctggcctgaggccctgatgctgcctacagaggacagatgcttattgcagggtccattcctggtgtagcacagggtgtggaggtggagtcctcgcctatgctgtccagcatcagcttttcaggagaggcttgtggatcaagggatgggagtgggaaagaggagaggtcctgcttcccgggaagatgctcggctccacttcccaggaagatgctgtgcagtccatggcacaaacctgctcgagaggaagggctcaggcttccaggggctcccgggttgcctgagtaggtgattggacgtgactttcctttggagtgacaggtcacttggggtgactgccacttaggctcctgtctgcctgcttgtacctctcttcctttcctgggccactgtaccattatgatacaaccatccactgtgttctgagactggaaactgagacttaagtcagctgacactttctaagtgtgtactctaggaaactctgaagagaggtgacaaaggacaagaagagcatgtggtgcagtcccagcaggctttgctgcacagtgacaccgtattgaacaggagttgtcatgcccagggtgtgcgtgttgacagaagcaactcgctcatgtgactcagtgtgactgatattgacagttctagttaatgactgatgtctatcatggagagaactggactggagggggaggagatgcctggctaagatcctgcctgtcacaggtagactggacagcaggaaggagtgaggccattcctgacttggagctgcttttgggtgtggttacactggaggagaagttgtaaatgtggcctcacgtggaagaccatatgctaagtagaccaagggaaactcttacattttttaatcttaagaaatgttttagccaggtgtggctgtacacaccttcgatcccagcacttgagaggcagaggcaggtagatctctgtgagtttgaggccagcctgatctacagagtgactgagttccaggacagtcagggctatgtagagagactctgtctcaaaaaaaaaatttttttaaaagacctttttattatacttatttattatgtgtggggatcagaggacagtctttaggaggccaccatgtcggatccaagcgttgaactcaggccatcaggattagtggcagctggcaagtgaccttactgaacgatgctgggtggtaaatagatgtcagaggcaactttgtggagtatgttctatttgttttttccagctaaggtttctctgtgtagtcttggctgtcttggacctctctgtagtgcagactgacctcaaactcacagagatctgtctgactctgcctcccaggtactgcgatcaaaggtgtacaccatcaccgcctggcttttctttacagtgtgtgtgtgtgtgtgtgtgtgtgtgtgtgtgtgtgtgtgtgtacatgtgagctcacatgccctcagactttagaagaagacatgagatcccctggatccagagttacagagagttgtaaacttcctgacgtagatgctgggaactgaactaggtcttctacaggagtagcatgcgctcttacccatgggacttctctctgtctcagacagggtctccacagaacccagggggtgttcaaagaacccagtttgagacccctggggccagacttaggtggcggttttctatttgctgttagcccccagctgtggtcagctcactcacacaggtcggtaagcttgggtaatgctaacaccgaggaatggccccttttctgcattcaaggttgggcgagtgagtcactgggtgccggcagtgggaagaaacatcattataagtcaggaggggtgtactcacctagtaactgaccattcccacctacaccacccaaatgaccgtgcggttttggagggcaggggctttgcttgctgacacttttctctgtcagcttctaccaactctgccatccaacttcatgggagtatggtgtacccacacccacaggaaagtcagtcccatgacaggaagaatcaatctttcagaatggctgggccatctgaaagttattcttggatacattctctggaagagggtttgttttgaatgttgttttttttctcctcaaaaagcaagtcagattccttaagagactcaagccactgggctaacaaggtaaaaacagcgactaactccctgccactcgccgcctctgcccatcttccatccaacagagcaggaagaccgggctccactggcaggtagcatcagggcctgcttaatagacaaacgctgtgtggttttgagactagtcttggttatctctgagcatcagttctccctcgcatataagggaacagagagtacatgaactgtttatccagtttcctacctacataccgtttgatgtcacaatgtgtaaaacacacccacacctaagagactaaggaatgctaactagagacacctgatgtccccagcctcaagggcaagggcagagctatatttcctgctaactcattcttgggtgctttctttgtacagtgctgggtattaaacccaggggctttgggcctgctagacaagatgtctccagtggtaccacatacccagctcttttctactaactctttcaaccttcatttgagacagtctcatggctggcctagaattcctgcataaaccagactagccttgaactcccagagaccccaagcctctgcctcaagagtgctgggatcaaaggcgtgtgccactataccaagctttattgctgttttgagatggtatcatgtagcacataggctagtctcagactttgtagctgaggctctgcctccatcttccaagaattggggcacttggctccatacattttaggtattttgttgttgtgagttgttttgctatagttttctttatgtttgttttttgagttagggtacagggtggccccagctggctttacactcactgtctagctgaaagtggccttgaactctttatcctactgcctctaccgtccaagtgatggactttcacagagctccacagccttaacccccatctgaaccaggggcacagagatttgcccttaactctcgggtccccacatgttgttcagtccttaaagccactcgccagtcagcccctccacctcaacatctcctctgaaccccgctggcaggtggcaggcctctcctggaagtttggggaaagattcctccccaaggctttcagttcctctctgctctccacttgacccttcgccatgaaaacattgtatccacagtgtagatagatagggctcagcagaggtgaagaacctctctacaggagcagaattgttctttaatcagaacaatcagggagtggaatggagactatgcacaagagtgtaaggggcttgggttttatagggaaaaaaaaaaattctggagtgggaagattcttgtccgtagacctactttctgctttcccaaggttgcaaatgttggcagaggtaccaggagttctcctggcatgttgagtcctagtccagagcctccctctcctaactgcccagggagaggctcaatctttctgcagggagtttctcaggcggcctgaagcttttcgttattaacccttcatatagtttagtaatgacttctattttctgagtgcctgctttctctcagattctgtgctaagtatatatatatttgtgtgtgtgtgtgtatgtatgtatatatatttcttcccaacattttaaaaatctttttattttttggtttttcgagacagggtttctctgtattcccctggttgtcctcgaactcagaaatccgactgcctctgcctcccaagtgctggggttaaaggcgtgcaccaccactgcccggcctcttcccaacgtttaaaaatgtttccacaatttaatttaattcccaacgatcaagattgccaggtggtggtggtgcatgcctttaatctcagcactatggaggcagaggcaggtggatatctgcgttcaaaaccagcctggtctacagattgttttctaggacagccagggctacacagagaaaccctgtcttggaaaaaaaaaattctttgtaaatcaggggtctaacctaagatgcccatcactgttacctctaaaacctaaaaagccaatcactgttctctcgactgagtagatgaattgcagggtctttttgccatggccttggctctggggcctacactgagttagagagctggcgagtgctggggttaagggatcccttgcagggatgctatggtgtgacaggcactggcctgcacaggtacctcactgtcccacccacaccccacacctgaaagaggaagcgtcttatttctattttatagaggaagaaactgaagcctcagcacattgggcaacttcctggtggcaaacagaggcagcagtgatgtgcagtgcgtctgcgcacaactatcgctttgccttttggttatttttgttgagaaaaaggtctcagtttgtagcacagactgtcctgaaactcatagcaatcccccggcctctgactctgttagggttactgccataaactaccatatccagttcaatttggcttttaggataataacctaaccctaacccacttcctgtgagaaaagtcaaaagggccccactgacaccacccactctatggagttcttaaacatgtcatccgaggggacgggggaatcagaaaaaaagtgcttacgaagactagtgtgttttaaaagcctgggtttcccggcttagtgtgagctgggggtggggagggtgttaccaggtctcacttgtcccactggttaaatgactgcagatacccggaagtcatgactacctcaagtcctgcttcctggactagttcacattatgggccttggaaccgatgaggagaaaacaagatagatcacctggatttaaccatgccaaaaccactggagaccacggagttcaggcctcagagccaagcacccaagagtctctctcacctttgcctggggctcagcattcagatgtgctcacaatgagagggcacacagcaacccaggagatggcctgtagcgttctcgtcttacagactgagtctcaggaagcttatggaaactcccaggtcaaggagctggactcaaacccagctctgctgtcctccaaagccgagatatggttcattgaccctgactagctaggatggagactggaccgagacagtgtgagaaactgtctatggcatctgtacgcagttccaaaggttgtgtagaaactacaagacataaattcagagaaggccttacaagatgggattcaccactctcacagaccttacgtggaggtcccctctagctaaggctgtccaagcaaagctgcaactctagtgggctttgaccaggtaagcagagaggtagttggaaatttattgctcacacacagcgggtgagaaagaggttgagagcaaagggccagagtagtggttctcagtcttcttgatattgtgaccctttaacatacaggtcatcgtgctgtggtgacccccaaccataacgttatttttattgctacttcataactgtaattttgctactgttatgaattgtaatataaatatctgaaatgcgaccaccgtgaaagggtcttccaactccaaaggggttgcagcccaaaggttgaaaaatgctgagctagagagcagcagaggtaggtgtgtgtgtgtgtgtgtgagtatgtatgtgtatgagtatgagtctgtatgagtgtgagtatgtgtgtatatgagtgtgtgtgtgtgtctgtgtgtgtgtgtgatgtgaagccaccttgcccattctaagtatacccaagtatttgtgtcagtgtgtagtgtatgaagaacatgagaacgtggcttgaggccagtcaggaaggtaatcaggcttttcccgagttatgtaaaacactaccaaaatgaagggaaactggtcctagcgtttgctgtcttgcttgaattctaaacatttcggccatgtttaaatcctgaatggtgtgaaagcctgagagggagacggtgtttctgatggaaatctttctttgttgagttctctagttcttatcttggtacttgtttcttgtatacttgccacttgtgtcttggtgctgggctagctatggatagctttcgcttggtgtgaagaaaacaaagtagtgggtaggactccaaatcagatttcagctggtggtgggttggggcaggcttttagttcgcgagtttgagctgaacagtgctgccggagtctcgcagcactgagatattaagtttgaggacatcaaacagggacatagcattgagatggccggagaatttcatccaaactctagtgtttgacctgctggcagtaaactgcacgctcagacaagctccacccaccgaggcgccgaccgtgtggccattggcggccaccgcctccgccacctgccccttaccttgggtgggcggggctacctgggccccgccccctcggctcgggttcccaggcctccgagcctcaggacccgccccctgtgcgaggcccggccgccggagcccggggagcttgggcgcctcgtgatgtcacggcagctttgatacaaagagccccttcggcccacgcgggtctcccggcaacgggtgcgggcgggggcgggaccggcggcttcaactggtgcggagcagcgcgcctcccggattgttttctgagcacggtgctggcttcgtccccgtgtaccccgccggacccgactcgaccagccgctggcttcttgttcatctacagcggcccgacctgcagccggtcgggggatgcgctccccgccggctcccggatgccaggtaagcggcgaccgcgggacgcacctagcttgcaccaggagtgggaagttggtggattcgcctctaccctccctgtgctggccagggagatcagagtaccttcgcaaaaccactgacccctctgcttgctccgggccttcggccagcgcccaggtgcgagcgtgagcggaaccaacttggtgcccgaggagggtgcccgcgatccctgtggcgctgttccagaagtgttttagggggaatctggtggaaatgggaagagagcttgtcagcccccatcagtgtcctgctcttagctgggctgcttccctagggagctgtaagtggtgaagttgtttccataggtgatggctgctgcatgaagccagtttcctgcttttcccctctcacggggcatctgaagggttagaagacagaaccagcctagtagtgtagggatttgagacaggtcctgcttcccctcagcaagatgctcctatgggtggaggtgtgcgcaggccaccagcctatgcccttgagtcccgtaagagcccacagtccacctcaatgtaagttgttgacatagttgcttctccgttgcgacaagtgtttcccagggcctagcatcgaagcctctgtaaacgtggtaccaatacagccctagacagcattccgtcacctctccatctcccacttctggtcttgctttccccaaaagagctagaaatgattcgttgctgaactcttaaggactcaccagttttctactggctgatttatagcacccctgccccctccccctaaagtagcagaggggtcagaggtcctgcctccgtgcttgctgctctagtcattttggattgggccccactttgcactggttcctgatgctctccaagcctctgtctcccttcccagagcaagaggcaggtgataattgcttgggttcccacattccctggggcaatttccagggcccttccctggtgaaagatggtgtctgttattgctagggaaaggagtctcagtggggagggttttacgactgcaaaagaccactgctagctcctccacccaccttcactagctgagatctcacggttcagccccagcttctggtattgtggcactgacccagactttaacctgcttagcggactctcacagaggcagggttaaatacccagggaactttatatgtgggacacatccttgccctccagaggaccttgagttccagggtataatctgacaccacccagctaccttgaatgcctgggccagttcatgttggttctttgaggtcagtggcctatagatgtggggtaagctggtgaagaatgtgtggctggagcctgaaggcagcacagcttgctggctgtgctgcctggtggaaaccacttcggaccttcagattctgggatttaggtgtggggatcggagtaaatgacaagtcaaagtttagagagataagactgggctgtggggcagggatggtttactggccaggccaggtaagcaagctggaccgtctgacctttgccccgagggagatcttatgggacagactgcctggagcctgtccttggtcagggctttagccaggggaaggaagaaaggctgaagttaggaggacttgagtggtttgagctgtcctttctggggctccacagggcaacagcatgggggcaggagggggtccccttctgtctgtgccaggcctaaagcaagttggccccttccagcctcttgctgtcctgggaggccttttctctggggctgtcacagctcacttaactttcctggtggtgatagctaggtgccttgttttagggggctggaagttcttctcggtagcctgttgtgcctatggttcctccacagtgaatcttgtcttgagggaccttaggatattacttctgtacatttattttaggtgagggtcaggaggaactggaacgggggaggtttcctgtgagattgcagacaggcaggcatttctagggttggaatagcctatgcagaaagttccgatccaccctctgacctatgctgtctcccggcacagagcttgtgttttaagtaggaagattcattgtctgtctcaccatctggcattagtggggtctcgagcccaggcctcaccaggtacacaggaccctggggtgtcgctctgttttctctgggtcagttctgctagctcacggcttagtaactagttctttatggtgtcaaatcactggtcatgacatgaggaagaccatcctggtgtcattgctagaatcatggggatcctgcttcaaccagctgggcgtatggtttggcatgcctgcctggtgtttcaccggtcactgtgatcttctttcctggatggcaccttgtctcctcctctgtcaggtggcatttcagggctttgtgcttttgccgttcctgtcagctcatattgcctggcacaaggcaggcacatgctgcttcactcgttcactacatagaatcttaggttcctgtgctcagtgttggcggaggcagtgagtgagatgcatgtgagtccttgcttcctggagctgcgatgtgggaatgaggcagactagccaggagttagacatccagtaagatggggtgggaaacaggcagggtgaacagagagctgctgggttttaaccagcggccagagaagggacaccttgacggaagagtaacaggcggcaggaacagcgactgtaacgttcctgaggtgggccctgtgtctaatgtggtgtgtccagcaggactgcagggtttagctgtgcctggagacagaccaggggaataagctctgagagacagagggatcctgctgctgtcagacagctggggagtagggtgcggctggaaatctgccctagtcgccgttcgtggagtccttggttttgaggggtaaatggtatctctcagagaaaagatgtctgtgtgactgagtctgctgtcagcttcctgacctcaacctgggactggtcagataagcctgtccacgtgactctgtgtgggttcggaacatgtgttctccaccacagaactggaactagtaaaagccttgctggtgacacgctggtagctgggtcttagagttgtgcttggagctggtctccttattcatactggtcagctcctgtcgagtggagcaagaccaattataagacccactctgtagcccacaagctcactggctcccatctgtctgcagatcttccttggcctcaggggcctagatgtccctccacctgtctgctgtgggcagttggcctcttaattcaggacaccagtcccttaaggatcccgaagaggccttcacatacctgggcagcagctttggggttcatctctttctgggcttcaaagtgtgtgtcttagacacctctccccatccactgacccagtatggtttgtgaccaagagttagggtgccattgagttctcagtggctggaatgagttggtggctatttctcctgggcaagactgttggcagctttcagcttgacctcatttcaaagcagcgttgctccagaggctccagtgggcagcaggttgtggagaatatgccctccaaagcctgagcttgggggtctcattttctcatgccagctgtctgactgggcctggcagtccttatctaggcacctagggcctcatccagctactgctaattaaatggaatttagcatcggccagttcacatgggcccattagaactaaaggaccttactcgggctcttatgaagtctgactcttagggagttgtgacacggactctgagaaccttcctgggtacctggggagcctgttgatcccttccttgattttaccgtgacctgagactgggatgagtggcaaaagcaacagccagggatgtgtgtatcctggaaaagtcggccaaaaggccagtgccatagttgtccgggtgacctccagtctcagccttgcccagcagtgggttctagtaatggcagcgtgtctagccctgctgcttgactcctttaacaaagaggaaggagtgtttaccttggtcagagttgtaagtgattcaacaagttttgtcttctcaaatgagttctttctcaaccatgttaacattatttaaatgaagacagagatctgacagttaagatctgtgtctttgcctgtgagatccttacctttaaattgatttaagtgtgtgtgtgtgtgtgtgtgtgtgtgtgtgtgtgcagaggcatcaggtgtcccttgagttgaagttataggcaggtatgagccacctgatgtgggtggtgctgggaaccaaactttgcttcttttaactactgagccatcacctctccagcctctgaatattttttaaagtgtgtgcgtgtgtgtgtacactcatgcacacctgagtgaaagcactggcctaggcagaggaattggatccccgctgaagcttgtaggcagcagagagctgctcacatgggtgctagtaatccaagcccaggtccaccagaagagcagacacacactctgaacctctgagtcacctctctagcacccctacctcttcaaaaatgaaaactgggggggggggatcaaaaaaaaaaggtagggtctcaccctgtagtcctttagggcctggcaatcaatgtgtgaactaggctggtgtggaactcacagacatcctcctgtttctgcctccctagttctggaatcacatagacacataggaatatgtcactatgccaggctgagtctttctcctacaagcctggtgtcgtaaaaagagaatccatacatcataactcagctagctagagaggaaaaagatgagagccaaaggtagggtgtgtgtgtgtgtgttcttttggcctccaacttaagtccctgtgctcagatgggagagtgtagaagttgttcctttgtttctgttcactggtttcccctgagagaaaaagcctgtgtcaaccaccaggaagtccctgttcctcacacagccagattcccagggcctgttttcttagggtagaaagataggtttgggagcttgaaaacatctgagcatagacctggctcttggctccaccactcgctgcttgaggtagaccgtttaattctgtaccttggcttcctcatctgctgcacaagaacaaaagtcctgcctctgggcacgccccatgcatgaccctacagtatgtaaacccgaagggcacttgtgctggcatttcagatcatgccatcttccccagctttttctcaggactgataagcttagttcccaacagagaggctagcaggttttgtcttgatgagataggaagggcacggtggggcgcggggactccacctcctgagggtctgtctgtctaagagaagcaaagtcctttctcagtgcctgtaattttaaagaaaccatcttggtctctgcacatcaccctttgggtccaagaagctggcaccttggtggcagtctgtgaatgagatgcgaagcacattctgaggtgacagccttctccccaggggcttggtctgtgtggggggctgcatttggcctttgctctctggggctgtgcactctgcacagctctgcccaccccactctgccccgtcacatcacagtagtctaaaaggggagcggcccctctttttctttctagccatgacctgcccgtgcctgcacctgtgcccagggaaaggctcacttggagcagggctgctgtctgtccagcagcccacaatccgccttattaaagtgctgtggcttcatctagctgcagaggctgcgggaggactggagaggggccaggctaaaaggtgcaggctgtacagcccctggccacattaggtgactgtccttggtagtcttccagggagcccgatgtacctgctggtccagcttggcctctttgagctctgcagatccgcggaagtgaggccagacagcctgacttggctggtacagtgggtggcggtcagagcaactctgcctggcacagggaggtaataaccttgaggtgatggccttggggccgagcgaggtccttgtttgcaaggcagtcctggccagcacatctctgtgtaggtagctgcatagtgggtagttgtacccattagagaagagggctggaaggctcttacagcatcaagaggggtggggagacagaaagtgtgtgtgtacatgtatgtgctcatgtgtacaagtatggagtcattgaccaccatgggcacacacaggataaagaactgactggatcctcattcccatttatactctccctagattttgagacagcttttccctttagcatgttgatgtctccgattggtgtgtgtagtatacacttggtggtgttataacttagctgacagcacctttcctttcttggtatacttaaaataacagtgcatctaaaacagagtcactgttactggatttaatgaaacacagaaactaggtaacctctggagaaattatgtaattcacccagtttctacaaagcagggacagaagagccacctgtagtggtcccagaattgattgagggacagcgttatgtggttcaaatgggcaagcttgtgtactggactcagatccctgtgggctctgcagctgtgtgggtctgagagcagaacagccactctgagcctcaggttccttccctactacgtgggactgtgagcccaaagttgtcgtgtgtgtgtgtgtgtgtgtgtgtgtgtgtgtgtgtgtgttcacctttccgtgtttctgctggctgtcagttcacatagtcctcttttctaaaaggagatcaggagcagggagtctgttactcacacacacacacacacacacacacacacacacacacacacacaccgtccctactccccacccccaccccaaggcagcagcaggagaccgatgtgataggagggcctcttaactagttacaatttataaatgtgtgtgtgtgtgtgtgtgtgcgtgtgcatgtgtgcatgtgtgcatgggtgtatgggtgtctgtgtgtgtttatgcatatctgtaccacatgcatgcctgatacctacagaagccagaagagggcattggatcctctgagactagagttacacaaagttaaccactttgtgggtgctgggaactgaacccaggtattctggaagatcaccatgtgtgtgcccttaattgccgagccatctctctagcctccttgacccgtgtataacccttgggccttcccttccttcatttttttcactgtgcctgaggttttgttttgtttcgttttaacatacgatttcccttaaagccttcttccacatctgtccccagcagtttcctgaggccaggaggacaggacgagtacccttgggtctgtgccgtgggttctgccccttccacccaagccccagtgctgccagcactattggtgtctgtctcgacagccttcacggtcaactctggattctctggtgctcagagttcttcaccaagagtctggggattcctctgagccctcctcactgagctgaatatcagacttgatccttacggctctgcggttctttgtatgtctgcccgtctgggctttcccctctgagagtggataatacacgtggcaggtgcttagcagaaggcccttctcgcttgattgtgacaacaatgtgctgctcttcgtgacaggtctcatggaacggtccatggatgctctgggcagggagcgatggtggagtcctgtgagcaggtgtcctgagtttagtggggctgggctgcagcagtcagtaggatggaggtggaaggtagggtgagtcctgacccttcaagggttccggtggaccttgtggatactctctgggatactctctgaggtgggagcagggttttggggcagtgggtcatgtttgaggtcctggcagtcaggtcttggtgatggggctttgctgggtgctcagtgagcaagtagtggcttcaagccgtgtttcctcaggtctcctctccgctccttgcctgtcttctctgaaggttctggtagcttctagctgacttctccaccttttgtgcagtcagggatttccagcccctgctttcagaaggtaacactaacttgtgggtgctgccgcagggggtgagccaggtaacaggaggttggtgcatgtcagaggaagaacttgtggaagggccttaggagcaggccctatctattggtatgcctttgaagggttgcaatggtctcccctgtgagtctgtggccttttgagctcagactatagctatactctggtccagtgctcttacctgcccctactgggcagagcttgggagggcactagcagaggggccctggggcaggaaggaccccacactaagacagcaggagggatgctgcagccctgagcaggagaggcatctgcatacaaggccctggcctaggtggtgtgcatgttgagggaggaagccactggctatccatccctccctcccatcagcttgctcgtgtgtctgctccatacagagcctctccagcagctgtgggtgaaggttggcacctcactgggccttccatggcctgaggggttttgtggcagagggagttgggtagttccccttttggcttcgggtttcaggctgtgtgtcatttcactggggtcactccctaacagtggtgaggacagagggctggccgctgctttccaaggcttcacctgaaatccatgcccctcccgacacagccatagaatacggagctcccaaagccagcctgagagcgctgggccatgtgaataattaagccctcacttccaacagccacatctttaaaagctataatttgtagcccgaaatagctgcctgttccaggagccaggagaacccttgtgcaggcttcagtgtagtctatgcattttgctttgacaataacacatgagttgccctggcccacagtttcttgggagagcctgaggcacggtgactgataggaaccgaatcttcccagggtgcttggggaataatttctttgagaactcaaatgcagtgtagtggcgagcctgggaggcagaggcaggcaggtttttgtgagtcctaggccagccaagggtacagagaccgcaagatcttatcccaagaacaaacaaaacagggagagaacatagctggggtgtctgatgtgaggttttaggtgcatgtggccttagatggtagatgtggacataaagaggggaaatggccatgtgttgagggaagcctggactgtggccaggggtggccagtgtggctctacaagccctctttgtttgtggagggatcttctgtgtgggttcagataggtgggtgaaggaacctcaggctaacaggaaatgcctccctggaccctctgcttctccgtggctggcatgcctggaattcttggggctagctgccgctttggtttccagatgtggaagcaatttaaagtctgttttcataaaccctgggagtttgcctctgaagtccacgtgctcatttggaaatcaaggtcattgactctgactagtggggaaggggtagaccagatatcctctgtgaatccttcttattaaaaaatagatttactagggcacttggatatgagaccctgggtttttgtacagtcacacctcaaccggggctgagttgaaggccggttcacctcctctcctgtgaatttttcttggagatgattcagccaggctctgctggatccttagttgccatccctgtactgaacagctgtgggggcaggggataaaggccctcaggaggctggcatcaccgctgagctgggtgcccacgtggccccccgagtggtagaggccctttttcctgtcctggccacaacaaagggaagaaatctgctctggattttaagtagccagaaatactgtctggtgtagagaaactggaaatatcttgctcaattactgggcccttctggccacagaggtggctgccccaggattagaggctgtgtgtacatgcagggcctgtggtcgtgtggctgcctgcctgctgtctctgtatgtgttaaccagtcactattcacatctgttttataacccacgagcaggattgtgaacaaacaaaaccacctttgctgttgcactgtctgactgcacttgcaatttttttccctccaagacaaggttttactgtgtagccctggctgtcctgtaaatcagtctgtatagcaggctggcctggaactcaaggaatccacctgcctctgccttccgagcactgggattaaaggtgtgcaccaccatacctggcctccacactgtcagtttttaatatccatggaattgttgttgttgtgtgtatgggcacctgtgcggatttggtgtgcacatgtggggagtctgggtggaaacatccaccgattggggatccctatgggcctcccctgaagcaaagggaaggcctttagttgttgggactatcacatcaaagtaattcagacctagtggttgacatagatttcctcggggttctggaagcttcatttgagagcagggtgctatcaggagggtttcttataaagtctctatccttagtctcccccaccccccaacagacaccctcatttctcttctgagttgtttgtttgtttgttttatgaaagagtctcatgtagcccaggctggcctcaaacttgctatgtagctctctctcatggatggcttggagtccctggcgctcctgcctctgcctgcagggtgctgggcttacaggtgtgcatcaccatgtttgtaaggacaccagccacattggacggagctcaccctgaaggtcttgtttctattcagttgtttctttaaaaagcccttactcaaacacaacaacgaattcttaggtgccaggtgctgagagttttacatataaatttacatacatcactgaagggctgtgggagccttcctccaaagggaggagcaaactgagggagcacagagcctaagatcccaggagaactcactggagggagctagcccacttccattcccaggcccaccctcagcgagggctcctgaccaaatgcaccatttggaattggggggcggtttagctatcactgcctcgtcagcagctctcctgcctgcccccttgtggtcttgtggggtgcttggttctccaggcctggtgtttctggggttctgaccctgaagggttttgctttaagggtgctttgcttgtttatgtcacttttatctggttcttcaagacaaagtttccctgcgtagtcctagctgtcccaggaagtaggtttgtagacctggctggcctcaaattcagtgacttgcctgaccctgctagaaatgttctttaacccctttcaacttggaaacacacatttccagatcccgtcccagtttaattccccaccgtgtgacatgaaataacactgaagttggagggcactgatctagaaaccccccttaatctagttgcatggcattcctttatgtgattttaggcaaggtttcactgtagcccaggctggcctcagtctctcagcgcttcccttcccttagtctcccgtgtgctgtgagtataggtgtgagccacagggaccttttgttgtggttcaacaggccagttgtctcacagaaggcatggtgttcgtttgtttgggggttggtccattttttgtgacatgtaactggtggtacctcctgctgtgggcccccttgggaggacaccggccagtgtctgtctttccattaatgatgctgtctgattactgtgttaaaggaacagtagcctgctcagtgctcaaagacttgagggggtttctgagctttcctgtggtctgcagtgtgtgtgtgtgtgtgtgtgtgtgtatgtgtgtgtatatgtgtgtgtgtgtgtgtatatgtgtgtgtgtgtatatgtgtgtgtgtgtgtatgtgtatgtgtgtgtgtgtgtatgtatgtgtgtgtatgtgtgtgtgtatgtgtgtgtgtgtgtgtgtgtgtgtgtgtatgtgtgtgtgtgtgtgtatgtatgtgtgtgtgtgtatgtgtgtgtgtgtatgtgtgtatgtatgtgtgtgtgtgtgtgtgtgtgtgtgtgtctggtactgtgcaagtatacagagtcccatcagcctctcatctgctggctttattctcgtggcaggtgttgggaagtgtgctgtgtgagcacggtcaggttggaggtattcccacctatctttcctctgatccaccattgcctgctccatcccccccagaggagggaaactctcgctctcagtcctctgaagttttctgtatgtattttgaaacttgtaaaagatgcacaaattcgtaggagggctacatcttggtaagtgggtcctccgtcatttttaagtgcctcctaccccttgaagtacttctgagactgtgtggccctgccagctttctctcggttgctgtggtggtaaggggtgtggcttggcagtagggcccctgctcacctgcatgctcacacaggagcagcagccagtcccttggcagcaccaaacaggccctggccaacaatgtgggcaacttctttctcttctctgtcagtaggcccttggtcaaaggcacaggaatctcggtcaaaggtctgcctaggtattgattggtttccagcttgggcactggctgagccgcagccttctgggcagttggacatgcttgtcagtcagagctgcgctgcccaggtctacctcagaccctccttcttggtgctgtaccttacgccagcccctctctgtggacttggctctttagatcccttaacactgctcatgcctccagaccttttggaacagatctcggctctgctctgggctgtttgatgtctcctttctaagtttttctgggagctacagtgtgctatcttcacctaatctctgccatttcctgtcagcaggtgggagttaagaccggtgtgggacctgggaggcagttgaagttgggatgaaaagctgtgtgggcttccacaggcagtggttggctaggtctgtgtgcccatggtctgtgtaaatagcactagaggcctgagaaatcccggcatgacttgaaaccaaagaggaagcatctattgttgctgcggcgcccttcccccctccccggccctgtcctcagacgagttgcaactgagttccaactgaggttaacattggaatatctgcacagagattgtcacctgagggctcctgctgaggggttgtcttgacctaaggtgagactcatcgggggttcaggagtagacttggagcccagggaccaaaccctgccctggctgccattcttggcgtggtgcaggtggggtaggtctgggaagaaacatggtagtctgtcctgccttctaaaccttcgcctcctgcaccaaaataggaagcccagggccatagagcttcgatctcacaggttaaggctactctcagagcaatggagatagcagagtgaccagttctcctgtgggttcccttggacttggaggtaggtcaaggttctggtcttttgcttggatgctaaccttaacttgatcccacctttgacctttgattggcaccaggcagccactgacaagcatccggtcagtgtgtgtatagcagggttggcagccccaggggaagtcagttactgtcaggattgcttcacagccaccatggtcgtcatgtctctgtgaaaaaaacagccaagtatgggggggtcatgagggtgtgtgtcactgtaggcagtcctagcccaccctctttgaatttggggtgttgggacctggagcccctcctcgaggggaggttcctgccacccaaaggaaaaacccatcatgaccctggtctgttccatgtctccagggtattgactggccacacacacaagagattccattgttggcctgtgcccacttacagccccttccctacagtggggagatccacgtgtacccacgggtgcctggttttcaagggaagctgagatgtgcccgcccaggctatttttacccagccctgtccccacagagctgcgctttggctccaagtcaccgcctgcggagtggagcctgttgccagagctgggggtggatgagcccgcacctcagggcctcctggactcccttctccaggcaacatctcatcttaacacttattacaggctgtgactaatgtgcaggcagacctgccaaggcagtgggcatgagaggaccctggtgcagggaggaaaacctaacttggcctcctagagctcagcctacctctctgtccaccccagtgtatcaccgaggggtcagtcagagggaagcctccccgggcttggatagaattcggaatgctcaggtgtggccctggagaccgtcccttaacctactaatgacagtaatcgctcacgaagcccttcccatgcattctaagaacaattacttagaacagttgccagttcactgaactccagttatggttagctcagctgtggaggtgagggaactgaggcactgggtagggtagttcagtaacctacaggccacagtgctcatatgtagtggagtgcgactggaacccactctagatcatgtccccaacgcccaccatctctctgtcatgttttcagtgtcctcagacagtgagccattgtccttaattagatcctctgacaatcctggtcacgtgtatgcatcgaggatgctcagagatgaaacacctcatccagcggtcacgccgctggacagcggccacaacaaactcttagatcagtgagtcagtgagtggttctcaagctgtgggtcgcaacctcctgggtttccaaacgacccttccacgggggccacctaaggccatcagaaatgacagacgcttgcattttgatccataacagtagcaagattacagttctgaagtagcaacaaaatcaccttatggttgggggttgctacagcatgaggaactgcgttttaaacggttttaagcgtcaggaggactgagaaacactgccttagatgctccttggatggtcgtccaggtcctgtggcgcagtgcagtttgattcaggccgtgctcagtcatgcgctcctggagtgctagctgctgagggtcaggatgtagacctccctgtggccaccacttcaccctctctgcccttgtagggaatggaaatacgtagccactctgtaccgcctgtgttctctgttcatctttgtttcgctgccaggaaacctagggtgtgtgaccttgagattccccctctgccacccccacccccctaggtggatgagggtaaataccaaatgaagctgtttggtttgggtcctgctgtacctcctgcctgcacagcggggacagtgggcccttgtgagcctctctgaggcttggacagcccagcacgtgtactgatactgggtcttttcagcagcccttgaattcagccctttccaacttcttacagaggaaagggtgaccgtgggaccttctgacgggggaacacagctcttagagaggctgaagaggggctgcctgggcagcctgtgtgccttctggcaaccacttccagttagagccggctttgttcatccctagatgagaagactaagtggaaacatggaggtgggggcactccggggatgtagctgggtcctatttcctgggacttgggctcagtactgtctccagtaatccctgtccttggaattattccccaggcccaaccatatatatctgtcaggctcttgctagctgaccagccaaggacctatggcaggtgagacaacctggtccctgagcagacagcctccagtctctctccacgccaggtctgacttctttaagctttcatagctgccaactggtacttgtcatgcagcctctcaggcaaaaatgacagtccctgctctctaggggaaatcccagggccttgtggaggtagagtcttgtccaggaacacaggacttaatgagcagctgagtctaccaggactaactgccaggctccagagctgtgccctccagcagtcctagccacagaggtcccctgggtttacacaggggcacactatatctactttatcttccatcaccccgtggaccccaaggttggggaagaaggtgtccctgagtttggacacaagcaagccagggtggctcatgggagtatagtccctgtggcccagaaggacaagaactctgtatgtagcgcgcacctctgcgccctcagggacagagccctgggaggctagatggggccacaaagagccatactgcctgctgaggatactgccttcctgaagcttccttaaagaccagccgtagcctttctgtgcagactctgaggaggcctctgtaagctcctggcttggacctgtgtactcaatgccagggcaactgcgtgatgacctccccttctccctgtgcacgcagacacacacacgcgcacacacacacacacacacacacacaccacagacacacacacacaccccactggtgatcaggacaagaaagaagagttctgcaagctagaaactcagaaactgctctgagcatccatatttctcagtagaaagtcagtctcctcgggtaccggtttcctgctctaccggctctcgggacaggtcctgggcaccacgggagatgcagggtgtagacatgtgctccaaccggcatggtgatcaggtggggtgatgacgatgctgcccctcatctcatcacacatcacactttagggagagactctgaccagccagggcctcctgcatttgttcagcacagagatctgtatcttgcgtcagcctgagtagagtttgcatggcatcctctggaggttcgtcatcagctcctacacagtccccaaagctctccagtgccctgagccacgtgacacagtttctctttggggttctggcctgagcgggtatagctgggggatggcacagagcagagccacctagacccctgggagggtgattttattgctagggggtgtctcccttgctcgtgtaatcccttccccgtgcaacttaagaatcatagagaaacatcaccagctccgacggggtccttgtgtgacttagctctccgtgcctgctaggaggggtacagggtgggggtcagaggcctcttctgtacccccaagaactacctcccttcctgaggtgtgtggggtgagagctgctgacccggcactttgctcaccgttccacagaggcctggccttgcaggagggagcagactgaggaggagggctgcttgggtccggcgcagggcctgtgccatcctgctcacttcttttactgcctgccttatgctgctttaatttgggggggggggggggagctgcaagaaatgattttgaagttataattaaaatttccacttgccttaggcaaacaattgtgggttgaatgaaaaggtgttaataaaaggagaggttaattttaaaagaaaatgttaatgtgggcatgcacctgcggacgcagctgggggcgggtggcacgccactcttggcagcctcagcctggctcctgggtcctccatcagctgggcagcttcagcagccacctgcctgctttaagcctcatctgcattcgatgggacaggagtgggcatcagagccctgtacacctctggcactcttgggtgagagatggtcagaggtcagaggtgaagggcagatgagtcctctgctcaaaagtccgccaggaaggagggttcgtctggtcttgggataggaagggtgttttcagcttttcttctgtccttcctgtgactaagatagtccccttgagccactttttccaccctgccaggagcgtatgtggctcgtggtgtcactgtactgctgtgggttgctgggtgaaggactgggtgagcactggtgtgcggtagattgtgggtcatggctcccaggaaagacctgtgatctagaaagggtaaagggactcgtcctgggacggagtgaggtcggatgcagctcctgcctgcagctggacggctgacggtggcagtccccaccgctcatctcatgccagcctggcctgcctgtctggtcaggtgacattggcaggtctcgttgtgggagatggtgtagaggactcaagctgctcccttgagggacaggccaccccctcactttcccctaggtgtttgtgtgctgagcagcatctcccgcgggggtggcgtgtgcacgtggactgttgccttaggaggagaacctggacatcatcaccagcatctagtctctagagagtgactcaccttatcacacccaactctggaaactagtgagcttcgagagtagccgtgacaaagggaaccgagtgtgtggcaggcagaccctctgcccagcctaccagaacactggcaggttactctctgagctcctgtttccctatcagtaaaatgggaacaaagacgaccgttctggagaattgtccccaaacagaagtaggacatgtgaattctcgtcagtctttggtagtcagtggctgctctgtgacattagttcccgtgtttcgggtgagcgttgtgtgagctgagggtatgtagctcagtgactttggagctgtgtgtggttcaacccttggagcgtgaggaagactttgattgctcaccccctgatctccacctttgagattgcctgtgctgatttcattggtccatctgggttcagctgagtgctggtgcaggcaggttttgcagggcataggctcagcccagctccaggtggcttctggtgtcctggaaccttttcttgtggacacttttgtgaggcttctggctccctgggcagcctggggagatgagggaaacacctacagtgcagttctcgggtagccctagacagagagtataccatgggcttgaaagcagagccactgggagtgcctgccctctcaaaagccaagtaccatgggaacggtttgctgagccaactacttacattaggttaaataagccagtcctgaactccgctataagatgatgtcattaagagttcagcgaacctccttgcacatcagcatcatttaaggcattggagcatctcaggcccaggagtgagagatcctggctggtggtgtctcatagccttttcttggctgcttactccggatagcccacaacagaccaaagtatggatacagcaaagtccaccccaggatactactcacaaaacgtgggaacctggagcacaccacacagcctccgggcagcccaggaggctggagagtgtcctttccccgtgcctcggctagcctaagccttctccaggcagttgggctatctctgtttctttcatgctgtttgactggtctacgcctgtttgaacttggctgtgactctcagcagtctgtcttgggagggaggggccaagataatctggtcagtttctgggagttcctgaaactgatttgagtttactttctgtcttcaggggggttacctgggagataagatgtttcaattttgaataaagtgttacataacagctggcaaagtggcttaagggaagacagacagacagacagactgactgactgacaaatagatatgttactattactgttttcttttttgtgctgagatgttgtggctgtacagggtcttggagggtacaccctagctgtgtggacttccccgcaccattgtgcctcaggttccttgtgtgaggtcagggttgtccctgacagttggctagggtgggtcctcagtcactacagccaagaagccgtcatgaacgtatgcggctccctgtgcagactgtgatgagggctccagcatagctgcccagtcctcaaggtagttgatctagttgtagcccttttctatgggtggctctacctgggcgacagaacccttaccgagctctcgtgactcagccaccatgagaggcccttgctgctgacacccccaccccacccccagtccctgcagacgcacttgtagacgggtgagtactgagtttcaggagccaccttactcattctgtccttctgactttccagggcagcgacttctctggctctactgatggcgagcaactccccagggaacccgacttcttccaggaagacgaagaggaagcgatgacattggccctacctgagggaccccaggagttagacatggacagtcccatggagagcagccaaggcccggagggctctgtcaagggttgtggcgaggagaaggagcctgagctggggggcctgttcctgccagaggacaagtgagtaaacccaattggcatgtggccccggagctagaaagtacccgtgacaccttataggatcagcacgcgcgtgttgcttccccaggtgtctggatagtggggataatgctggaattataagccccgtgcagaagtcagcctgctgaggcagggaagacgggctcagtatgtatttctgatggggcctagaacttgctgtgtagaccaggccagctgaattcacagagacccacctgcctctggctcccgagtgctgagatgaaaggtgtatgtgtgtgcatgtgctacctctgacttattgttagatgtatttttatacgtgtgagtgttttgcctacatgcatatgtgggcatccaccacgtgtgtgcctgttactcacagaagagggtgtcggatcatctggaactggagttatggatggttgtgagctaccatatgggtgctaggaactaaacctgagtgcttggccagatcagcaagtgctcttaaccacggacacagctctccagcctgagtgtctaagactcatttatatgtattctgaattgtgtgtgccagagtgggtgtgcattctgggttatggggaggctcagagagggtgtttgtgaatttgtaggggcatttgtgggtactgggactgagctcagctcctcttttgtaaatttatttacttatatcttaaacacatactctgcctcctggtcccccttcacagagtccctcccccaacccctccccttctccttaggtatctcccaggtattccccaaccctaagagcaatgtattctcttcccagccacggtgacgtttcactcacatttataaggggaaagggagtgttgagagccattcagcttgaagtacaagtgacccccccaggggggacaaagtgtgaataaataaaatgcagattgagtgccaggggactccttagcatctgccagcagggctgtctgtggtccttacacagaagctggggttccccagggacagagtttcagaactaacccaggtgtcatctgtcctccccacatccccaccctccattaaaagtttcccattgtgagtgtagactccctggacttggggagtcatggtctgtgggtgagcagagaatttgctgtgactgtcgtggggaagatggatgcaggcaggctactagctgagtctctttgctctcaggttgtagtcagccccaaccaggccctcatgtttcccacgggtggtccatgagatgccctagagtgtggggcctctggcatgtgtagataattctttagaattaggcatctttggactagacatgccactttatacattgggggctggttctccctgtgttgtttgtcatgataaaagatagagggctagagagctggctcagtgggtaaaggtgccagttgccccgagcctgagctccagaatgcatgggcatgggggggggaagtgggggcatctatgaatcccagccctcggacagggagacgggcgaaccgacctggcagatgcagcagcaagagcaaagcagggactctgctggcctctggcccccacatgtggactgtggcaggagtgtacatgtgcccacatgcactaataataataataaattttgaaaaattaagggataattaaagattggaaaagatggggaaagtgagaatgagaggaaataacccttcttaacccaagtcccatggccatgttactctcatgtgctctttgcttctcccttcccttccccttccacttttctaaacacggggtcttgtgtagccctggctggcttggaataatctatatagcacaggctggccttgaatttatagatagacctgcctctgcctcctgagtgccaggactaaaggtgtgcactattgctgccaacatagtatgacactgtcccagaataaatgtattaatcactgtcaaagcttatatctaacttatcattgataatgtatttctctgccttgttaccaatgcttatatgagtctttcaacaatcatttgatactctataatttaataactgctttactgatacatattctaatacagtaactataattatagtgtaattttaatctctctgttgctaaaccattaagaaataagcagtgtttcgctgtctggggatggcacaatctactcatctgttatggagacatttctatgtgggatgttccccttaggacggggtccccaaaagggtaaggtttatccaggctcctgtgatctgttgggccaggctggttcccccgagacactgcatgcgggtcacgccctcagccctccactaactgggtgcttatggccctaggtgcctcgtcctcactccatctgtgaccacatcagacctttccactcactccaccgcctctcttatcagcaacgaggagcaatttgaagactatggcgagggggatgacgtggactgtgctcccagcagcccatgccccgacgatgagaccagaaccaatgtctactcagatctgggatcttcagtgtcttccaggtgctcccttactctgggtggcatttgcagtccatggaaaatgtcagaaccagtctagcctcgtcccagacaggcaaagaacatccttcctctgtccagggctactgccaggctctactggcaggcagggtgccaccgtcttacatctggttggggcgggggtgggggtgggtcacataataaaagggaagccttttattttggagaagaaacagttaattggcctgggagtctgcagacccctgtgagggaatgtctatgtcaccttgcctcctagaacctcagtgttctaaggacctttcaagtgaccttctgtggctccttcctgcctgccggagtcattccttcctgtgaccctatctgctaattggtagcacacatgcacacaagcatacacatacactcatactctctctctctcacacacactctctcacatacacacactcacatgcactcacacgcactcacactcactcacacacacacctctatctctggcagccaaggaaaaggatgctctggtttatttccattcctctgccacaaaatagaaataagagccttggggaactaggttgagcaagctcagtgaggtggggcggggcacagcctgccagcagcacagagagtgacctcccctgcctgtccaaccccccccccggcccccccccccccggtccagtgcgggacagaccccaaggaagatgcgacatgcctacaacagcgagctgctggacgtgtactgctctcagtgctgcaagaagatcaacctgctgaatgacctggaggcccggctgaagaacctgaaggccaacaggtgaggccacagccagaggggcagggccaggcgggacccatagcacaaggcccatgtgcggtcaggtacagcgtccctgcagggctgcccctggggcgtttcctgcagcacctcactgagtgaggtgtgatgagtgatgtcccttcagcccatcatacccgagtgtcgggcagtgggcagggtgtggaagtgtactcatgaccctctgttcagtgactgtgtcccccttctctctctctccagccccaaccggaagatctcaagcacagcctttggacggtaagaccctcttgggagacagagagctgagtgcttaccactcagagacagcagaggggcggagcagccccttcccgtgcccttgccaccctgtccccacttagtaggatcagcatcttcagatcctcacttcgtcaaccttagtgggccttctagtgtgcccatggctgtttgtgttacccttccgctcaggaccgggcttggggagcgccctgtctaccatccttagagtagaagtcgtttgggtgggaaggtcaggtggtcaggtggaggattcctcctgtgacctcttttctggcagcccctgtactgaaaactcacccagcccgtagcctgagttggggcccaggctgtggcagacatggcaggcaggtgccctccacccccacaggcagctcatgcacaacagtaacttcagcagcagtaatggcagcaccgaggacctgttccgtgacagcatcgactcctgtgacaatgacatcacagagaaggtgggccctggcactgtctgcacgttcctgggatgtgtgggggacctgctccgggctgctctctggggacttgaaccctatgcccacctaggagtccagggcaagaggggctctaatcacgtggccctcccttcctctcaaaatatgagcgttcttttttgcgtagtcatttggagatccttgtcgtgggcttttctagattctcagttccgtgccttcaaaagcctgttgtaccctgccccaccctccatgctgcaggtgagcttcctggaaaaaaaggtaacagaactggagaacgacagcctgacgagcgggggcctgaagagcaagctgaagcaagagaacatgcagctggtgcacaggtctggggcacggtggccccggggagcgcagagtgggtccccagtctctccggctctgagccacttggtctagattctagacctgctagataactcccctgggtgtatagccccagggcttgtgactcccaccgagtgagaacagctgttctcaacctgtgggctacaacccctgcagggatttcatgtcagatatcctgtatatcagatacttacaatttataacagtagcagaattacacttataaagtgtaaaataattttatgggtgcagggggtggggagggggggaaggtattaggaaggttgagagccactggcttagagtgctagggcctgacctcccttcccggggacatgcccctgtggcagggagtggaaggcaggagggcccaggaggcgctgtgtgtggccagatggtgatggaacggatggacagcagggagactgggaaggacagatagcagggagactgggaaggatgcttcccatgctgtctggcctcccagatgcaagaaacttggtagacttctctgtgctgggtctggtcccacatgctgggtccccacatggcctttttgtatgccccagcccagcccgatggagggactgtggactgttggacttccggtagccagcattgggttatcactccagaggggcctgacctcttcctggctctggatttcttatggccatttgccaggatggacctaagtaattggagtggctctggtcaggaagtccatagaaaagagagggtaagagttggaagccattggtgtagctgtggccaagcctgctgccttcactgtcttccgtgtggcctcgctcccctctggagctttttctctagatctacttctccctggagtgtgattgacacacttcttgttagatgtcacagtgtccctaattcacctgtcagctaagctcagggcccataggcctgggaacccgccaccatcacagtgagtgtgctgagggcctcgacagggctcaggcccttgttcgatgggacgagagtgcaccccgactgaacgcgtctgcgccccacctcagggtgcacgagctggaggagatggtgaaggatcaggagaccacagcggagcaggcgctggaggaggaggcccggcgacaccgtgaggtctactgcaagctggagcgggaaaagagcacagagctggagctgctcaacaccaggtgggcaccaggcgggcaccaggcctcgtgcctgcagcgccccgcccctctgcaccccgagggtagtgctgcccccgagggtttccggtaaagctgagccaatcgtcctagcatttctacttaagatactataaaattgcaccggccagttcttcagggagtaggcagagtgaaagttcatggtagccatggtgcttgggcagaggaagccacagaggagggtcagaaggctgggtctcatagctaggcctggagcgccccctgctgtcagatcgtctcctgaatttgagtgtgggtaagctgagcctgtggcctcctgcatacaccagcatcttccttgctagaacccaagtcagaggctggaagaagagtaccggccctggtcacagggtttctgtctgctgtgtaaccccgtctatccccttctctgcctgccccacaccatgcatcgtgtgctttgtgatgaggctgtggtcttgtcactggctgggcgtggtggggcccctggagggacaggcactgtcctggtattccccggcccaggtgtttaagcagagattggtgaggagacctcccaactcatgtgcctgagactccccacctttcccaacaccttctcaaccttcctaaggctgtggactcttcactacagtgcctcatgttgtgacctccaaccataaaattattatttcgtttgctatttcataactataattttaccaccatgaagaattgtaatatgaatgtctgatatgcaggctctctgataagggacccccagattgagaaccacggctttcgaggctgttatttgcaatatggctctggggctggagtcctaaggggctgctcacattaaacactcctgttttaaatgactacaggctcaagagaggtggctgggaacagagaggtagaggagagagggcagtgaacagggcctgaagcaggagcacagaaggtcaggctctgagggtaatcttacctgctgcccttcccacagctcctggggcggttcgtgtgcagccatggatggtacttcccatcattggcatactccctcctcacttccttagccagcttcacacctcttagcacggaggtccagactcctccctggcccttgtctggaggccttcctagggtacccaaggcctcattaaggttgataaaagcttctccagaaagaggaggcagaagctggggcgagggcactgccagagtcagatgtggttctgtacattctgtagccatctcacctgcctataaaaccatctgagtgccagccccactgggtcactgtagggcagctgtctggaatcactccatagagaatcattgcctccgatcagagaagctgccgtgagcactccgaattccagacgagggctagggatggagaatagagagcagatatgggcatagccttaagactacagatgctaacgggagagccctgtgcttaccagacataggactattctcctcctcctccaagaagtggccttcctcggtgtttcatgaaggattttgtgtatgtgcatgtgtgttcacatgtgtgcatgttgaaggccagctttcagaaatttttagattttgaaatatatatttatgcatacatacatcttggagataggatcctgtctaaacatgacatttctctttcttttccttcctccctccctccctccctccctccttccttccctcccttccattctttttctgagacagggtctctctgtgtaaccctggatgtcctagaactcactctgtagaccagctgggttcagacttagaggcccacctgcctctgcctctgagtgctgggattaaagccatacacaatcaagcctggctcctttgtttttttgttttttctttttttttgttgttttttttgggtttttttttttttgtttttttgagacagggtttctctgtatagccctggctgtcctggaactcaccctgtaaaccaggctggcctcgaactcagaaatccgcctgcctctgcctcccgagtgctgggattaaaggcgtgcgccaccacacccggctcctttgtttttaaaatagctgatggtgccagggggatggctcagtgggtaaagtgccatacagaattcgcgtctccagaacatacataaaaccaaacacagcagtgtgttctgtaaccttagtgatctgcagcagagattggagaacccccagaagttggagggtcagctggtctggcaaactaataaaagattctgtctcaaataatttgaaaattctgtcaaactcattttcaatgtgacccatgtacactacccccccgtacatgcacaacacactgaactcacacacagttaaaaagtaacttaaggactgaaagtagttttatatatacacacacacacatatacatacatatatatatacacacacacatacatacatacatatatatatatatatacacacacacacacacacatacatacatacatacatacatatttttgagactgtctcatgttactctggccaccctggaactcactatgtaaactatgctgttctcgagctcaacagagatcttcctgcctctgtatcccgagtgccagaattaaaggcactaataattccgcacatgaagccatttcatggtatacaggattttggcttgtggtatcacgttagtgcttaaaaagccttggatttaggaacatttgggatttttggatcggggacgctggacctgagttatcctgtgagacattttcttactcttgtctccattttctcttgggtggtagtttctttctcctggaagcagaggctggttgtcagatgcctcctctctaaggccgtttctgctccagagtctctgagccatgccatctttctttcccagggtgcagcagttggaggaagagaacacagatctgagaacgacagtggctcgactcaagtcacagaccgagaagctggacgaggtgagccgcaggtcccagcaagatctgggttcacagagtgatggcagtcagggctggatcgcagtcacaggagccctgacgtatttccctacagagaagacgtaccagggtatggtagcacacacctgtgatcccagcacgcaggctgcagagaaaagagggtcatcctctgctacatcatcaactttgaggccgtcctagggtacatgagagttttgtcttaaagataaacaaaagcaagtttattaattaaataggaaggacaagtgaatgactttcgtttctgaatttacaaaatttcaagttttctactgtggaaatttagcctgccttaaaaaaaaagatttatttattatttatatgtaagtacactgtagctgtcttcagacactccagtagagggcatcagatgtcattacagatggttgtgagccaccatgtggttgctgggatttaattcaggaccttcataagagcagtcagtgctcttaacagctgagccatctctctagccccctagcctgtcttatatactgtaaatgccttacattgtagaattctcttcttgaagagggtgggcttagctcctgtttggacagacagcttcttctcaacctctgtctgacactactgaaggacatcaggggcctgggacgtttcctgctatgtttctagaatgtccccatttgccacactgaggtcctgcagagtgcaagggccctctcaggatgcctgccctgaccatgtctgccttgtcctaggagcggcagcgcatgtctgaccggctggaggacaccagcctgcgactgaaggacgagatggacctttacaagcgcatgatggacaagctgcggcagaaccgcctggagttccagaaggagcgggaggcgacgcaggaggtgagtcacaggccagggcccccggggctccgctcagagttactgctgcagccaacaggcttctttccccgcacagctcatcgaggacttgcggagagagctggagcacctgcagatgtacaagctggactgcgagcggccaggtaggggccgcagctcctctggccttggcgagttcaacgccagagcccgggaggtggaacttgaacatgaggtcaagcgtctgaagcaggtaggccccagagccatgtccagtggctttgaaggtggatgggtcagccattccggattctgtttagaaggggggagccacgagccccagtctgcctcctgccacctctcctgtctcttctcagctacctgatcgccaaggcccatcatcccatcccccactcaggcaagcagcttacctctggttactgccagcagttcttgcactctcaggcccctgtcttgttctgggtgttggaatgagagaaccatgctcaggctgcagatgcatgcctggctgggttgggacctccgtcagatagggcctaagtctttaagattctgcttctcatggtgtcccatcattcctgatgctgcagcctgtgttagcgtgggatcgggagggggtggtggctgtgaagggagtgaagtccaaactcagctgggcctgtgaaccagaggctgggcatggaccacacctgagttcattcacccaggcaaaagtcttagtggccgtctcctccagtaccgctagcctgtcacctgcccaggggctcccaggttcctgggataagctagaggtaagagttagaggggcagctgcggagctatagtgtcacctgccttctggggcaagggtgtcttgaagcagctcccactacgcagggtccagaacctggctgcaggacgagccaggaaaaccagccctcccttcctgcacagagaatccagaatagcacctcccttgtgccaggtcagggctgcatgctgagctgctggtgggcagagctccctacaggaccctagagagggaagacctctgtcacctcggttctcccaggcagggctgtaactccccttctcgctgaggacacagacacagggacatgggcgccagcgggctctggatgctttccagagttcatgatgcctttgttctgttggcacaggagaatcacaagctgcgggatcagaatgatgatttaaatgggcagatcctgagcctcagcctctacgaggcgaagaacctctttgcaacccagaccaaagcccagtctctggctgcagaaatcgacacagcatctcgagatgaggtagccttgtcctcccattctcttggacactcacatttgtctccatggcgacttgtctccattctgtgggtcctgccccagcttccacctgctgataccacgaaccccagactacatgggatcccaaaggcaggctgaggcctggccctaatagtcctccatttgctactgtctcagtgacatcagagctgagcaggagacagcatggggcaggggcttagctttcctaactcaggagctctgggctcaagtcagagtggtcttaacccagatggagaccagaattcccgaagcatctacttttgcacacgggtttacttggtctcttagctcacggctttagtgcttccccatagacatgacaggccacacccatggcagcgggaagggagcccagctcctagcactacagtccatcttctctacatcagataccagaacactcagttgagttttagtgtgaaactgagcctctgtgttcctgactcctctggcctcaaggagagcaggtaactccatggggttggagcagcagtttagctgcacttaaatgtcgctgtgagagagcggctagataaggcaaggctggagtgagaagggcactggtctcagtggagaaaaagctggcagccccagccctgactatgagtgcatctggccagtgttcccaatctctgtgaaaagttccccatactttagccccttcccaggtcaatgaaattgccttaggctctgatccctgcttaaaatgctcagctgatctgggcgcctctgtccttggtcactggctcagcatctgacccacctttctcattcccttcagctaatggaggccctgaaggagcaggaggagatcaacttccgactgagacagtacatggacaagattatcctggctatactggaccacaacccctccatcttggagattaaacactgagtcagggttggctgcagagcggccgtcggacctgggacctaagggcaggcctgcctgaggacgaagaaagatgcaggctttgcccacatgcactctgtgattgtacctctgagcaccctctctgtgtgtgctggtgtccgtgcaaggagtgagcttggggccatggctgtgggtgacaacccacggtgagctgtgtgtgcactttgtagcccctttgtgaggggcagagggggctggatgtgggggagacactctcaggagttaacagcaaggcctggaagcttgcatttaggatactgatgaaatgattctacctctgggataagggttagaagatactctcaggagatgggttctctcccctcccccactgaagtggggacaaaactgttacattctccagaatttggtgtccttgccaacctttcaggccacctttcaagccgggtttttttgttttgttttctttagctcagaggaggaaggggtattggagaggcccctgaggtctagccccctggggtgcagataagcaggtccagtggactcggacttacagagcagttagagtgcactgtccatgcctttgggctaagtccatcgtagttttctgagcccctcccagtcttgcttgcctacctcccctttctggtttggctttgctttgttttgaagatggaaaatacaagcagcattcagctgggggtggaaggaaggccaagaagggtagggtgccccaaggcaggtgtgtgttagcactgggggccaaaaggagtgattgcctgggagagaggtgtgttttcatggctgcatcgtcacacatgacctctctgggttccatgctccttggtgaggacaggcctagggaagggtttgcaggactgatacccttgcctcggctttcagacccatctgaatcaggtccccagttagagagccgacacggctggcaggaggtccagtggagaatactgggggaaccttagtcttcggttccgtcaatacatgatgggaattcacatacacacacccgtgttgggggttgagggagggttaaaatgtgatctgggagtaggtactgtatagaacattccggtttatctcagttttatacagcttgtgattggttggcttccttaccccagctcctataaaggtgtatggttcaagtttccccttcagtttgttttcttgagcacatcttgtgtaaaaaggaaggtttagggatgctggggaggctagcgaacagaaaggaggcacagttgaaagaaaataggggatctagggtgtgtgccccggggtgtgtgcctgcttggcagagacggggcttcggtcagtttcagtccagtcatggtgctttctttggcttttgagactccctgtaatcatgtgcttggaattcatctcatgctgcatagatagtgcgtgggcctggtctgcctggatgagccacaccaggaagacaggaaggcttgatctggggatacggggtttccttccctggcgtctgggaagatagagaaaaagggggctgggtagggagtcttgtgaggaacaatgggaagataaccatggcttgaggttggtccgtgtgccgtgctagcagaatgcagaggccagctgaatataggtcctggtaagaggggcctacgctcaggtgagcagttcagacttgaagttgtatgggccgcccgcttcacttgtatgtgggtttccagagaaggccacagagaccagagtcagtgtcacagaagaggaaggagtctgtcagggaaacaggcagggaaggaaggctttaggcccaagttgtagggctggaagagtggactccctgaggacatgaccaggtttggaggcccctgtggatctggacgcttgctatctaggcctctggaagaatgatttctgaatgtggtctgacttccatgtaacacacctcaggcgaaatccagccttcttacagaatacacttagaaaactctgtcaacttccccataagatcatgtttgctgtttgctgtttcttgtagtggtgacagtaggtttctggttttttttttttttttttctgttctgggttagaaggcccaggggtcccagtgccacaccacccatgggaggttccagaacttcccttgcttggcaagaatctaatctctctttctactgcctccctggctctcgctccagttgagctcccagagactttcgggagtctagagcttacacttggcattcagttacatttggattgcagataaacaagaggttttagaatcaccgtgttccatgctatacctggttagaaagcgtttttaccattctgatcctcacgtgttctgacagttggtagaggtgtggcccaggccttggaatgctttaagaatgccacaggtgacgctaatttagttaggtctcctgtgaagagggtgtggctctttctaagttgaagggtctgcagtgatttgccaaggtccaggaaggttggggccgtgaaggaagtacacctttcatgtgacacttagccatccttgtattccactgggagccaaacaagatgagcttctgtctccctgatttgtttccttttatttttgaattagccacttttttttagaccagtagttttctttgagactctacagaggaagttccttttgaaaattttatttctgatatactaaaaccacaaatctcaaggaccaagcagaacgccaggccttgagcctgagtctgccagtttggcagtgtgctggtgtcatacctgatgctggagggcctgggagtggaacacaggagtggcgtgcctggcatgaggttcagtccctggcagcatggaagaaagttgatgacagaaccacctctgacttccatatataattggtagcacagtgtggcccggcacctgtgtcttcaatggccttcccaagtgttgttcatgcacagatcaaggtggaggcccgtaaatcatgtgaaatgtctgctgaggtcagcagggctggagaagcttgtgtgtggcccagaggatgggtaattatgccactgagtggtccttgccctgagagtccagctgttcccactactctgaaagtctcaccctagacggacaggatataagtgccagcatttgactgggcataggcccattaggaattggaggcaggtaggcgggaagagctggaccttgagagcagcctagacgcagtggccacttgtctccgcgggctttgtccatttcataagggtgtctcagttgcttccctgtcagtgccaaatcagcagcacccagcccacactctggagaactctaggtgatggtctgatagctagttagtcctgagttgtggtccttctgcttctgatggtcctggggctgttggtacataccgggctgtgtaagggatccagagactctacagcaaggcctaaagaataaggaggacttcactcatctgaggggcattggcaaatctacacctgtctagataggactgatgggagtgggaaaggtacagggtggtcaccaggctagtcaccaggatgtccagtgactctgtcgaggtccaggtgaagctctttagggcctcagtgatgcctgttatccccagtctttcctcactggggcccagcgcttccctctggtggctcctcaggctggtatcactagcatgcgcttgacgaggggcctccagttagagcagccagatcttggaaaggacctccctgtcctgacttggaccctgacagaacgtacttgcaatgggtttatcaggaaagggtagaggtagcaccttcagggcggggcagctctgtggctctgtcgctctgtcatcgttagctctgtggctctgacatcgttagctctgtggctctgacatcgtttagctgctctgctaagaaaaaaagccacttgcagaaaaggctttgtttctggaagcatagtcaggttaccagccttgtcgctctgtgcactaggggctgggtagctttggtgttccttccttgtggactcctcctcttcccattgtgactgtatcgtagggatgtgcattcctgaggtaccatatggaggacagagtcccaggccacctctcctgcaggcctaacttctggtggccctgtctcgtgttgggactgtcttctttaccgttctgcactgtttcttgtctgcatggtttggggtcctcgtgcctttttaccttgttaccaccacacaggattctctgttacccactgcccccttttgtacgtccccttcccccatctcccccagtcctgtgcgtactcacgtgtgcagccatatggctcaactgaggccagctggcaaacactttaccccacaccaggccgacttcccatagctccccagctctgttgacttggtaacttttgtacaggattttgttacaatcttaagcatagggaccacttaatccccatgtacctgcagctagtttagaagccctgcatcccagacaagggtagctttgtgcagaccagcctctcccgcaaacctcttcctcgtgggttcaggtatttataaaagacagatttcctttaaaatgaggccctggccctagcagggaggtgacaggtctacaaagctctgtgcatggctcttctggaggaagccccagccatgtggtttccagtgcttggcaatacatctgggtttagggccattgcctctcgtgtctcccctgatttgtgctgaaggaagtcacttgccactgtccctgcctgctgtcactacctgtccagcccttccttgtttgctggtgctcagaccagagtgccattaatcaccagaccaacgtcaggacctgcacaggacagagtgcgctgaggactctcggccggctgcctcccagcttcagctcccatggggctgggccttctggggtccaggtggaagaagctataggcagataggctctgcctttccagggattacatctggggctttgcctcagaagccagtggttgcagatggccttagctttgggcttgggaaggagcttccactttaggccccagggaagggagaatggggtacagcccaggccctgaactgtttgtttccactctgttctctccagaaacaggctttcagtggggggcaccttccaaggaactgtattgtacagaccacagtgtaaataaaaagttggctttttgtgcctgacttgtgtgaacttctgtgggggactgggagagggaatggaggtgatgcaggggagaaaggcaggacccaaatacggtcatgttcagttcacaggtacattatctttagaagctgcaactcacacacccccagccccactgaagaaattgtcacctgtactacagtgctggaaggcgtgggagtaaacacaactggaaatgtacccctccagccccacccctgccacccacatgctcaccaggtcctcccgtgtggttagtatggcaacctgacccagtcccctggagcttgagtttgctgcctctggaccgccactcaggtggagtgtcataacagtagctatatatgtggttttgtggcttgtgaagttgtaatgctcaaagaatgtaacaaatagattcagtgtttataaattataaattacggtaggctggatacagtaacacaggtctttaatctcagttcctgggaggcacaggcaggtagatctatgtgagatcacaggcagcaggatctatatagtgggacttgttcgcaaactaacagtttttaattttttttttgagacagggtctcaatgtgcatctctgactggcctggagctcactaggtagaccaagctggactcagaggtctgctggcctctggcttgatagttctgggattaaaggaatgtgatccagcttcaaacaacaaagaaatgtttataaattggttaatggacttcccatcttaaaaattctccttttggggctggtgagatggctcagtgggtaagagcacccgactgctcttccgaaggtccagagttcaaatcccagcaaccacatggtggctcacaaccatccgtaacaagatctgactccctcttctggagtgtttgaagacagctacagtgtacttacatataataaataaataaatctttaaaaaaaaaaaaaaaattctccttttgcaaatgaaatggtgcggtggtttatggagcctgttgctcgggttcaagggagagggggcattcgataaagttcacagaccacacaggtaggctgtatcaccaagggacttctctgctgcaatctcatctctcagtagcagtgtttgtttcttgcagacaatatacagactagatctggggataagggacccctttccctgtcatgtccccttatttctctgtctttctgttctgtcttgagtccagcttgcttgatagccctttccagcccatgcggggctggtgggacatcatactgctttgaaccagtccttgtaccgaacactggaagactccagtggggttcataccacctactcctggttccagggctgccagcagacacccaagcctacaggtgctctggaagaacggccagtgttctaaccactgagttatctcgccagcccatgataaatcttttttcagtccatggtttgcagttttatctacggcacagaagtcacagactctgggcacacggagaggctgcgccggctcacatgtacttagggcccactgagtgccaggtagagttgaagtgcttttgcaagggtggcttattactagatgaggacactgaaccaccccagggaccctgctcgccagtcgcccagaattcaggctctgctgatatggagactcatcacagagcaggatcagtaagatcctgttcaagtgagaggagggactccagtcctggagaggccccaaggggaaggcgtggcatatgtggagccctgaagctggggcacctctccctaacagggtggtctaagaggctgaggcgggaggggtaggctaggagtgagtacctggggctcactcaggaggaagaagagaggtctgggaaggagggtgggaacactgcaacctggcttggctgcctgggtgggttgacagggtcagcagttggccaagttttctgggtaaactgggccataggcctagtagctctggaggcagtacctagcctgtcctgccgtcagcccaggttttgagtcccaggtttctgagctaactttagtgtctcagatatgacttttgtgtttaataaaacaaacaaacaaacaagccaggcatggtggtgcatgactttactgccaataccaggaggcagaggcaggatgatctctttgagttcaaggccagcccagtctacatagtgagtttgaagtcaactgaagttacatagagagagaccttgtctcaaccctacaataacaaaaattgaaaagcattggggtttttatcttggtgtgttatgtgtggatggtggaggcagacatatgccacattgcatatatggaggtcaatacaagtgtgggtatcagccttcactttctccttgtttgagatgtttctttgcttctgggattcctctttctgccttccaccttcctgtagcagtgcaggcattgcacacaccactgcctgcctttacagggttcttgggacttgaattcaggtcgccacatcagcctggcacttgctcaggatttgaggttttgataggcttacccctaagagcactaactgcccacttacagtacaggctataggatgacactgtgccttggagactgatgacccgagggagagctgtatggtctgcagaaccaggaagaacagctgagacagcgagctcagagacaagtacatggggtggcaggctttcccagtgtcccctcagaagatgcacctgtctctaagggaacccacctgagcagaactggtcccccagcgtcaaccaagctgagttcttactgtccaggagtcccatgggcagtcctcactgtgtgtccctgcaggctcacattcaggggaaactcccatagcctgctgcagctgtgggtgatacttgaagaggattctgtcttctctcagtctcccaaggaggtccaaacggttactctctcgattctgatactgagagcgcctctctttccactcatagtatgttacacactgctgatcttggctctggggagtctgagaatcaatcaggagttctgggccagcctaggctttatggggcttgctctgtctgtctgtctgtctgtctgtctatctatctatctaatttgagaccttttcttaaaaaaaaaaaaaaaaaaaagccacagaccagataccatgacggagcaagggcaaggagggagtgagcaggtcctgagcatggtgtggaaagcaatctgacaagacgtgaaagggtgctgctgacacgccaaaggctgcaagttgcaccctgccgctaacccggtattcgcagatttatttcgaactttgtggtgtctgggaaatttgatcaataggaaaagtgtcaggttgctacagtcccaaagagaaaggaaaaggggtctcggtggcctttcctactctgggacctaaccttagcaatgaaaactgaagcggcctttaaattacaattttatatatgtgtatgtgcatgtgcaggggcgtacatgccatgcagtgtctgtggaggcccagaagcttgcggaaggtggttctttccactgtggactcaggcctggcatcgagtacctgtcctcactgaaccatctctaggctgtttccatttctccagagtctcagatagcccttactggtcttgaattcctgatcctcttgcctcagtctcagagtgctaggattaaaggctgccatgcccagctccctgatctatttttgattcatgcagggccacagttaatggctgacacctattttgtggacgaagaaactgaaattcaatagtagcagtagggacgctggacatggctttgattgtttgcacccagcagctcggcagtcttatctactccacgaagaacccaacctcaaacctggaaaggcaccggatctgtatgtgactgtccccagcagggtagctctatgacctctgtggtccgcagagagaatggcttatggttttcccagtctgagttcagctacaggctgtgtctggctcacctccctgctgtatcccttgaaggctagctagactggatccttcccttgcttcatatacaaaaattcactgagcacaggttaaaaggaagctagtaaccatgttttaagctgcaacaaacaaaaagaacaaataagccaattttaaaaggacacgagaagacatttctccaaagacacacaaatggccggcaagcccaggaaaagatgtcacgccagtaatcagcacagtgaggacggccactattcacagccaagaaaatgatacaggggcatagagctgcttgtgtgctgtggtgggaattccaaacaatggagccattatggaaactgcagatcccatttaaaaaaagacacacacacacacacacacacacacacacacacacacacacacacacacggacgcacaccttcaggcccagcatttggaagacaaagggaggcctacctcaccattctgttctacaaatcacaagtagtgggctagccaggacttcaaagagagacccaccctgtctcaaaataaacaaaaatgtaaaaataaaattaaacccacattgctgcttctgggtgtgtatctcacatgaacttgccactcttctcattggagtattattgacaaccaaaaaagtctaccaggcagtgacaggtaaagagaatgtggcctaagctgtgagagaacaaagccagcacatccttctgcagttacaaaatggaagctgaggggctgaagtaagttggtccccatcagacacgctgcatcattccttagacatgaagggtctaaggttgtcagcctctgaaaagcagaaagaatgatggttgccagagacccgtggagaagggatatggtgtctaaggggctgggtttcagttcagactggatcccaagtcctggggctaaagagtaccagtttgggcaactcagcaagaccctggctcagaacagaaagtagaaagaattggagaaaaatacttattcctcatagagaggacctgagtttatttccgggcactcacccaaagtgtgagtgtgggggggggggctcacaaccacccattactagtttcaggggatcccatgccctcctctgacctcggctggcaccaggcatacacttggtgcacatacatagctgcaagtgaagcactcacacgcataaagtaacattctaaacaacctcttagagagagttggggg

SEQ ID NO: 1099 - DNA, 2329 bp, Mus musculus
ccgggcggtgcgagcgcgatggcgaaggcggcagcgcggggcttgggctagctgccggcggcgcggatggcgggtggcgcgggctgggcgggcgcccccgcggctctgctgcgctccgtgcgccgcctgcgcgaagtgttcgaggtgtgcggccgcgaccccgacggctttctacgcgtggagcgcgtcgcggcgctcggcctgcgcttcgggcaaggagaggaggtggaaaaacttgtgaagtgtttggatcccaatgacctggggagaatcaacttcaaggatttttgccgcggagtattcgccatgaaagggtgtgaggagctgctgaaggacgtgctgtcggtggagagcgcagggaccctgccatgttctccagacatcccagactgtgtggagcagggcagcgacttctctggctctactgatggcgagcaactccccagggaacccgacttcttccaggaagacgaagaggaagcgatgacattggccctacctgagggaccccaggagttagacatggacagtcccatggagagcagccaaggcccggagggctctgtcaagggttgtggcgaggagaaggagcctgagctggggggcctgttcctgccagaggacaagtgcctcgtcctcactccatctgtgaccacatcagacctttccactcactccaccgcctctcttatcagcaacgaggagcaatttgaagactatggcgagggggatgacgtggactgtgctcccagcagcccatgccccgacgatgagaccagaaccaatgtctactcagatctgggatcttcagtgtcttccagtgcgggacagaccccaaggaagatgcgacatgcctacaacagcgagctgctggacgtgtactgctctcagtgctgcaagaagatcaacctgctgaatgacctggaggcccggctgaagaacctgaaggccaacagccccaaccggaagatctcaagcacagcctttggacggcagctcatgcacaacagtaacttcagcagcagtaatggcagcaccgaggacctgttccgtgacagcatcgactcctgtgacaatgacatcacagagaaggtgagcttcctggaaaaaaaggtaacagaactggagaacgacagcctgacgagcgggggcctgaagagcaagctgaagcaagagaacatgcagctggtgcacagggtgcacgagctggaggagatggtgaaggatcaggagaccacagcggagcaggcgctggaggaggaggcccggcgacaccgtgaggtctactgcaagctggagcgggaaaagagcacagagctggagctgctcaacaccagggtgcagcagttggaggaagagaacacagatctgagaacgacagtggctcgactcaagtcacagaccgagaagctggacgaggagcggcagcgcatgtctgaccggctggaggacaccagcctgcgactgaaggacgagatggacctttacaagcgcatgatggacaagctgcggcagaaccgcctggagttccagaaggagcgggaggcgacgcaggagctcatcgaggacttgcggagagagctggagcacctgcagatgtacaagctggactgcgagcggccaggtaggggccgcagctcctctggccttggcgagttcaacgccagagcccgggaggtggaacttgaacatgaggtcaagcgtctgaagcaggagaatcacaagctgcgggatcagaatgatgatttaaatgggcagatcctgagcctcagcctctacgaggcgaagaacctctttgcaacccagaccaaagcccagtctctggctgcagaaatcgacacagcatctcgagatgagctaatggaggccctgaaggagcaggaggagatcaacttccgactgagacagtacatggacaagattatcctggctatactggaccacaacccctccatcttggagattaaacactgagtcagggttggctgcagagcggccgtcggacctgggacctaagggcaggcctgcctgaggacgaagaaagatgcaggctttgcccacatgcactctgtgattgtacctctgagcaccctctctgtgtgtgctggtgtccgtgcaaggagtgagcttggggccatggctgtgggtgacaacccacggtgagctgtgtgtgcactttgtagcccctttgtgaggggcagagggggctggatgtgggggagacactctcaggagttaacagcaaggcctggaagcttgcatttaggatactgatgaaatgattctacctctgggataagggttagaagatactctcaggagatgggtt

SEQ ID NO: 1100 - protein, 633 aa, Mus musculus
MAGGAGWAGAPAALLRSVRRLREVFEVCGRDPDGFLRVERVAALGLRFGQGEEVEKLVKCLDPNDLGRINFKDFCRGVFAMKGCEELLKDVLSVESAGTLPCSPDIPDCVEQGSDFSGSTDGEQLPREPDFFQEDEEEAMTLALPEGPQELDMDSPMESSQGPEGSVKGCGEEKEPELGGLFLPEDKCLVLTPSVTTSDLSTHSTASLISNEEQFEDYGEGDDVDCAPSSPCPDDETRTNVYSDLGSSVSSSAGQTPRKMRHAYNSELLDVYCSQCCKKINLLNDLEARLKNLKANSPNRKISSTAFGRQLMHNSNFSSSNGSTEDLFRDSIDSCDNDITEKVSFLEKKVTELENDSLTSGGLKSKLKQENMQLVHRVHELEEMVKDQETTAEQALEEEARRHREVYCKLEREKSTELELLNTRVQQLEEENTDLRTTVARLKSQTEKLDEERQRMSDRLEDTSLRLKDEMDLYKRMMDKLRQNRLEFQKEREATQELIEDLRRELEHLQMYKLDCERPGRGRSSSGLGEFNARAREVELEHEVKRLKQENHKLRDQNDDLNGQILSLSLYEAKNLFATQTKAQSLAAEIDTASRDELMEALKEQEEINFRLRQYMDKIILAILDHNPSIIKH

SEQ ID NO: 1101 - DNA, 123106 bp, Homo sapiens
agcccctcccaaagtgccaggattatagatgtgagccaccacgcccggcaagacatacatttataatttcagtttttaaaaatttgttgccagactctgtggctcatgcctgtaatcccagcactttgggaggctaaggcaggaggatctcttgaggccaggagttcgagaccagcctgggcaacatagtgagaccccccgtctctacaagaaaattagctgggcgtgttgacatatccctgtagtcccagctactcgggaggctgaggtgggagtattgcttgagtctgggaggtggaggctgcagtgagctatgatcacaccgctgcactccagccaaggtgacagagtaagatcctgcctccccaccacacacaaaaaaagtattatagtttgtttaatcgtccaagatatgatctacatgatctaccttggtgacagttccatgtttacatgaagagaacgtgtattctgctattcttgggtggtgtgttcgataaacatcaattaggttaagctggttagtggtggtattcagaccttttagatcccttgttgatttttcatctaactagctctactgttaaaaattagattttctatctaactggttatgttctctagaggagtgttgaagtctccaactatgattgtcaatttgtctatttctcctttcaattttattagtttggcttcatgtattttgaagctctgtttttagggacatatgcatttaggattgttatgtatcttcttggtgagttgaccctttaatataatgtttgtctgaatccttggtaattttccttgtttggattaggcaatttctgttgttctatcactgtttgtactgtgatttccgttctgctattgatccaatccaatgaacttttatttcatatattgtattttttagttctaaaatttccatttggttccttttttctagcatctatttttctgcaagaatttcgaaatttccatttatttcggattgttcacctttactgaaccatggagcatggttataataacttttttaaagtctttgtctaataatggcaacatctgggtcatcttagcattggtatctatctattgattgccttttttttttttttttttttgagacggagtctcgctctgtcactcaggctggagtgcagtggcacgatctcggctcactgcaagctctgcttcctgggttcatgccattctcctgcctcagcctcctgagttgctgggactacaggtgtctgccaccacgaccagctaattttttgcatttttagtagagacggggtttcaccgtgttagccaggatggtctctgtctcctgacctcgtgatccgcccgcctctgcctcccaaagtgctgggattacaggcgtgagccaccgcgcccagcctttttgtcttttgtcttgtacattgttgtcagcttttcctgtttctttgtatgtcaagtaattttggactgtgtcttggacatttggaatactgtaagacactggggcctgttaaaatcctctgaagaatgtcagttttttctttgtttgtttattcgtttgtttttgagacagggtcttgctctgtcacctaggctggagtgcattggcatgatcatggctcactgcagcctcaaccccctggccttaagcaatcctcttaccttagcttcctaaagccttagggttacgagcatgagccactgtgcccagtctgtttgtttgctttttaaatcagttaggttgacgcctcagatcccaacctgccctctgtgaattatagtttcaatgtcagttcagttttcaaagcctttgcagtgctattcagatccaccccaagtatacatactccaggggccagtctgttcagtctacactgtagttcagttctcagagtctttggtaggttatttggggtcagttccatgtatgtgcagctcaggagtaggctaggacctcaaatacaacaactttatgggatcatattctcaagctcccttctttctgtgatgccgccctatccagcttccaggggcccctttttctcatttttttccaggtaaaagattttccctttctcggagttttaggtccccctgtgtgactgctacggctgctgccaccacctaacctttgggacaggttttaccttgtagggagggggctgggagagaaaaaagacccagggcacttctcccactcgatttttcccaggaggcccccctttcccggcttctcatcagaaagagagtttcttccgtagctttttctctgtgcacctgctgcacagttctgggatttgggctcctgagtctaggtcaggaaatatgcaagctcaccaccgtattcatcttacttaacgtttttgttttcctccccaattcaccttccactattcacttttcacagtccttgtgtagttgttttatgtcttctgtcagggtttttagttataatcaatgggaaagctagactgtagtgtgcttactccatcttaaccagaaccaggaggcttgcttggctttaaatattggcatctaattttaagtctgtcctcaagccacatctgagatgctagctggccacctctgctttagtggcacagtgtctcaaaattaatttttctttctttttttcttttgagatggagtcacaatcttggctcattgcaacctcccgcctcctgggttcaagcaattctcctgcctcagcctccccagtagctgggactacaggcgcgcaccaccacacccagctaattttttttttttttttgaggcggagtctcgctctgttgtccagcctggagtacagtggcacgatctcggctcactgcaacctccgcctcccaggttcaagtgattctcccacctcagcctcccaagcagctgggattacaggtgtacaccaccacaccctgcctaatttttgtatttctagtagagatggggtttcaccatgttggccaggctggtctcgaactcctgacctcaggtgattcacccatctcggcctcccaaagtgctgggattacaggtatgagccactgtgcctggcctaatttttcttttaatactcaaattcttaagcaaaagttgtcagtaccaatgccagtttttctagattaaaagagagcagaatacagatttattctttctctggtcagagcaagcccctaaacctgtcagcataataatagtgattgcaattattttagcagaaataataattactggctaagggcatggagtctggaaccaggcctcttgtgttcagccgtcttctacgaactgtgtgaccttaattctgaatgactttgcctttctatgtctcagtttcctcccctgtaaaatgggaataataatggtatctgcttcccaggtggtggcgaggattaaacaaattcatatgcatagagcgctcagaacagtgcctggcacaaaggaaggctcgctaagcatttgctttgattcccgtgagtaatggctgacgtttattaggcaccttgccttgcagacagcttcacagcggcaagataagccggcttatctcacttgctcagatgaggcagctgagatttcagaaaggcaaatggcttgcttgagtccatctggccttcagaccttgaaattagggaggcgtgggtggctgggcatgggttcagggagtatctggctggtaatcaatcagacagcaacggcaacgaagctttttaacatcatctggtctgagctagaagagatgtgacccaggggactgagtggggggaaaaaatcagctcaaagagaaaggcaacagaaatagaaggggaagcctggtaattgagtggccccaaaaaggaaagatcaatattttacttccagtgaacaaccaatttccctggcagcaagctggggcccagctgtgtgtgcttcagtgacaacagctgcttctgcaatgcctgccaggcctggcgaacccgtctctcctggcctgggagccagagggggagccccagggctgcccagccacgcatggtgtgtgccccagggtgggggcggcccccagctcccctgcctggggcccaggctccccacgaagaccacatggggtggctatttgctatgctccctgcgtgaccttgagcaaacccctccccccgctgggacctcgcttcaccaactgtgaaatgacgggctgggtcagtggaatgtgtctggccgaggaccatctgtggcaaaaggttacctgatgtccaggaaggtcgagactctttgtgatccaaggcgaggggtccccacgtagtgagtaaagcttctttgatgctcagggcgccaggggatagaaagaacactttagtgcagacagccccgtgagagtctctggcccaggaaggcaacagggagcagtggctgactctctggggtcagtaagacctgggttcaagagttgccactacaggtgggcaaaaattttaaatttaaaaaaaggaaaataaaaggggagcgttaccactgcagtgactttgtctaaatgtcttaccctctctgagcctcagtctcctcaatttaaaatgggggactataataatagctactgttaagtttgctgtgaggattaaatgagactatgtgtgaaccctccgtggactccaagcatttgcaatacttctccacataaatgatgctgttatttattttaaaaatcactgagcctgtggttgatggtatgtattggtaataaccagcatgcattgttctaataatttcacacctgttttcttttttttctttttcttttcctttttttttttttttttgagacggaattttgctcttgttgcccaggctggagtgcaatggcaccatcttggctcaccgcaacctctgcctcccgggttcaagcgattctcctgcctcagcctcccaagtagctgggactacaggtgcacaccaccatgcccagctactttttcttgtatttttagtagagacggggtttcaccatgttggccaggatggtctcaatctcttgacctagtgatctgcccaccttggcctcccaaagtgctgggattacgggcgccaggcaccacgcccagcccaatttcacacttgttttctaaagggcaggacatcagtgtgcctggccatttttgttttttgttttttgtttgctttgagacggaatcttgccctgtcacccaggctggagtgcagtggcacaatctcggctcactgcaacctccacctccctgtttcaaacgattctcctgccttagcctccctgagtagctgggactacaggtacacatgaccacgcctggctaatttttgtatttttggtagagacaggggtttctctatgttggccaggctggtctcgaactcctgacctcaggtgatccacctacctcagcctcccgaagtgctgggattataggcatgagccactgcgcccggctggcctggcacttttgtggccactactctggggctgccactctttgaagagccctgtgggagcagctgtagagaggtcacagcctggggtgtgcccccggttgcagcttgggccatggcgtgggtgcttcggggaccatgcagtggccctcagtaccccatctgtctgcctgtcatcaaacaaccccacccccacctctgtcccaggtaggcttttgctggcagaggaatggacagctcgccccaccagtgtctcccagcctcagggagctgtggacacagggattacagaatccaaatccctgcactcctgcctcctaggtggacttgaggtgagggtcctcatcagtcagtcagcactctgtggccgactccacccttgacttgcttcagaaataatgaaggcagagccctgaccttggagaggactgtaggcctgagcatgggaggctggagggtagagggtgccctggctcatccccacattcacaggccccctataatgccagcgatgcaaaggcaggaggagaggaggcggaatgccagccaggatggtgggtgggctcccctgcagccctgcaggtggcacctgggcattgctattctcagaagccacgtcattgcctggcagtgtcagaggctggcatggctggggggagggggcagctgcaatgttgaggaggctggcaaaaagccactttcctcctttactgaaattttgcaggtctttcctgagagcccactaggtaccaggttcagggaggttcacagaaagaatgtggcacggcccctctgcccttccctcaccccagactcaccccagagtggaaaagcagggtcagctggaatcaagatgcaagcacagagccgccaggttccaggcaaggagaagatggttagggtggggcctctttgtccactgctcaccttccaaagcccactgggcacagcccccatggtgccaggccaccggcagtgaccagggcttcagacccctgctgcagctgccacgctgtgggcatgcaagaaaaacgtggtccctataaatagatgaatccccaacgtggtttggcttcggtgcctgtgatgggtggtgtggtatgccggcgagtctgcctgtgatggcgtgaacactgacaacagtgactgtgagcagtttcctgcatgctgtgctctgcaggccccgggtgccctcagatccatcatctgcagcccagcctgagcagattctggaaagagctcatcctggcctggctgtgctatagatactgatggtgattattagggggagcggcaagatgcctgacaaggagtgtgagcgtgtacacatgtgtatgcactattgtgtatgtgtggctagccagcagaaccagcacctaccaccatcaacccctgaaagagtgcctggcatgtaagaggtgctcagtcatcacttgttgaataagtgagtgaatgaatgaatgaatgcttgtatgggtgctgtgggagggctgccactaagttttagaagcagttttagatttagaagcaggcttctgagccaggcgtggtggcgtgcctgtagtcccagctacttgggaggctaaggtgggaggatcccttgagcccaggcatttgaggctgcagtgatctatgatcatgccactgcactccagcttgggcaataatgtgaggacatggctcttaaaaaaaagttgttattattatgatgatgatgatgattattattattatttgagacggagtttcactcttgtcacccaggctggagtgcagtggcgcgatcttggatcactgcaacctccaccttgaaggtcagaggttctcctgaccttggagaggattgtaggtgtgagcaaaaacaaatattatgaagcctctactatgtaccagtcacggtgcaagcgaccaggtatacagtggtgatcagaatggacagggtccttgcccttagggagcttactttgtagagagaagatataaattaatcaaattatcccacacacatacaactacatgaaagagtatggagaaactaaggctaaggctttctgcagtgaggtcgggagatactcacacctgctaaagttcaaaccacacaatatcccaatagacttgggtgtgcaaccgaagtcatgatctgccagtctccagcatttctcagctgcgagtgccctgactagctcaccagtcagaaaggctttgcaatctaggatttctgcccagccaatgagctgcctctgaaaacaactttctgtggaaatcctccgtaaaaattggtctcctggctgggcgtggtggatcacgcctgtaatccaagcactttgggaggccaaggtgggcagatcacctgaggtcaggagttggagaccagcctggccaacatagtgaaacagcctctctactaaaaatacaaaaattacctgggcatgttggcgggcgcctgtaatcccagctactcaggagaggctgaggcaggagaatctcttgaacctgggaggcggagcttgcagtgagctgagattgcgccactgcgctccagcctgggcaacagagcgagattccatctcaaaaaaaaaaaaaaaaaaaaaaagaatccttcctccacttgcctcctgggatgctcttcggggctgtcctgatcccgtgtacctgaattgcaattctttgtttcccaaataaacgctatttcctttgacctccatgtcaatctctttttagttaacaatagcaagttgcaacaaattgtttgaagggaaagtataggatgctacaagacaggatagcagcggggtgggccctgattggatgggggtggtcaggacagacctgtctcagggagggacgtttcatagaggtacaaagggagacctgaaggatgaactgacatggcgaatggggaggacagctgtccaagttgtagggaatagcatgtgcaaaggccctggggcagagaagagtgtggtggtttccgtgaggagctgaccaaaggccagtgcagctagagtacagtgagtgatgaagagcatgggaggagagggagtggaaggggtcagatcacatggggccttgtgggccgtgttgtggagtttggatttttttttttttttttttttttgagacagagtcttgctcagtcgcccaggctggagtgcagtggcgtgatctcagctcaatgcaacctctgcctcccaggttcatgccattctcctgcctcagcctcccgagtagctaggactacaggcgcccgccacgacgcccggctaattttttttgtatttttagtagagatggggtttcaccatgttagccaggatggtctcgatctcctgacctcgtgatctacccgcctcggcctcccaaagtgctgggattacaggtgtgagccaccgcgcccgccctggagtttggatttttatcctaagtgtggtggaatgatactggaaggttttaagcagaggagtgggtgacacgatccagttagacttgcatgatccaggagagacaggatgatggctatgaccaggtggggctcctgagaggtgtgggaaatgagggagctgtgggatacagtgggagcatggattgaatgtgagtgacagtgagcagacgcagtgatgctgaagaaccctgcagtggcaggaagggagggaggacggggtcagggagtgggacatttgatgggtggtattggagggggtgatcactgggttgaccaagggacttggtgcctgaggtggaatatgaggcaaaaagaaagtcaaggatctgagaggccgggggttgatgggtcatccacacagctgcaggaacccccaaagatgaattgtaaaagcaaaaagctggaaataaccaaaatgcccagctattaggggtggtgaagtaaattatgatgaacccaccgggcagaatgtgttacagccactaacaacgtgggttgtacacaccaagcagcatggaaactgtttctgtcctacctcctgttacacgggagagaaactctccaacctcagggatggctgactctgccaggtgaaaacttacttccttattcatctaacactcttcattgaagtgcaaggtacaaatagaacagaaaagttcatcagccaccagtgtccatctcagtgagtttccccatctagccagcacctggaacaagaaatagaacaagagaaatggtgggatttctgggtcatttacaatgagtttgtgtctgttttgtgtgaaagaaaccaattttaaaacatcggcagagcctcggctttcattgtgcagtccctgggggaaggaggctcggcccctgaagccgtgtgctcagggagggtgtgctcagggaggagccggtgttggctctgcttttctttgcccgagttgtctgtcaccatggggagaataaagtggccccatggctgatactgaccccagggtgagggtaagaggactgggcggggacactggtgtccctccctccctcccagcctccccacccagctccctgagtcttcgggagatccttgggtgtctcacacctgtccctgcttcattcccacaggtggaaaaacttgtgaaatatttggatcccaacgacctggggagaatcaacttcaaggacttttgccggggggtgttcgccatgaaaggtgaggtcttcccgggaggctttcccaggcgctctccggtcctgcccagctggggaagctggtgtgactgggggcccagcctggattcctccccacaggggtcccagagcccaggatgggccagaagtcggttctgcctctggcttccgggggggccagaggagaaggacactgttgccccagccgtggggggctgtggtctcacccatggaagtcacttctgcccttccccttgtctgcccgcctctggagaaagcctccttccctgcttttctgtcctcttcctctctctcccgctctggggtgaccaaacccaatgagtctcctgggatgtgggagggactccacttttaagaccagggcagtcctgggcaaacctggacaaagcgctggtcacatgactgcccgcctccctctgagctgctgcttttgtgtcctccctgctcccgcctcctctttttttttttttttttgagacagggtctggctttgtcgcccaggctactggagtgcagtgccactatcatggctccctgcagcttcaacctcctcggctcaagcaatcctcctgcctcagcctcctgagtagctgagactacaggaggtacaccaccatgcctggctaatttttgtattttaagtagagatggagttttgtcacgttgtccagcctggtcttgaactcctgagatcaagtgaccctcccatctcagtctcccaaagttctgggattacaggcatcagcctccatgccctgccctctcttcctcttaattcttcctaattcctgcctttcttccttgcccctgcttccagttttaaggggacaatataaatccctctgtcttgtcccaaaaattcaaaggccagttgtgagaaacttgcaggaatcagaatatggccactcacttactactaagctgtttatctgagacagtgagggccaggcacggtggctcacacctatagtctcagcactttttgggaggccgaggcaggcggattgcttgatctcaggtggatcacttgagtccaggagtttgagaccagcctggccaacatggcgaaacctcatctctacaaaaaatacaaaaaattagccgggcattctggtgtgtgcctgtggtcccagctacctgggaggctaaggtgggaggatcacctgagcccaggaagttgaggctgcagtgagctgaggtcacgccactgcactccagcctgggtaacagagtaagaacctgtctcaagaaagaaaaaaatctgagacagtggcataggtcaccagccaggtggacttgctaaggcctccccactagctgcagagagaatgcagtcacttctggagtcccagggtgtctgcttatctgtgaaggaagccatggtttcctgtctgcggctcagatcaagtttagcccttttctgtggggtgcctatgagtcctgggagggtggaacgatgcagggtgagggatgaagggaaccaaatacacggtgcagggggcacagaacacagaaggtgcccagggaaggttttctgcgtggatttgacaatgggccactgcaggctgcacctgccatgtgcctgtgccaggcattttgtcaggtccccctcccagttcagtacaaccttggggcgtttggttgggatctcaggagcgaggccagccgtgtacagagtcagcaggaactgcagctgtcctgcgggcagccctgtcctggacgtcccagggtctgcaggacacggggggcgcccagcctcggaggaatgggtgtgtttgctttctccagaggctggcacagtcgtttggagtccctgcaagccaggtgggcagcactgccttaggtcccctcccccaggaaggcctccttccttcctgttgccccagcctgccctctgtgtgtgggaattagtcccagaggacaagggcctcttgcagctccctccacagtgccttgagctgagttccccaccgcctgggctccatccctgccttccagtgctcagctggcctcctggagcctcgggcccccacctcagcccttcccaccctatgcccattagtcagaagcagagcagccgtcccaggctgaggctcaacccctcactgtcccgtgtgtctgcctgtctgcgcagggtgcgaggagctgctgaaggatgtgctgtcggtggagagcgcggggacgctgccgtgcgcgccagagatcccagactgcgtggagcaggtaaggcttggggggcctcaaggacctccatggctctgcctcctccttcttggtcttgcctttgctccattttcagtatctgggaggacccagaacctccctctgaggacccttcttgagcatcagagtcaagaaatagtttttggaacaggagccctgagtccccttgggaagccccagcagaatgtgtaacagctgggggtcctcacccagcaactttatttcccatctgtggcacggaggagagactgagttccagacagggaaagtggcaagtggaggggaggcaggactagaattgtttccttttcttctgcaccatcgctctctgagctgaacgcttcctgtttgtttgttttcaaacaacaacgaattctccaattccctgacactaactggtgtccagcaatcagttccacctgccactaactacccagcattagcacagactccatgagtcaaggtcaactccatgagactgccccacctcccacgccagctgcagttcttcctggataactgcaaacacagggttcccaggaccacctccctcgggctgggtaattcactggaaacactcaggaaatggttgtacttacgatgatcagtgtattacaaaggatacaactcaggattagccacacggaagagatgtacaagacagggtatggggagcagggatgcagagcttccgcaccttcgcttaggggcgctgcctcccagcacatcaccgtgctaccagcacccgggctctctgcatctcattgttcaagaatttgtaggcctggcgtgatggctgatgcttgtaatcccagcactttgggatgctgaggcaggaggacagcttgagcccaggagtttgagagcagcctgggcaagatgatgagaccccgttctctacataaaaacttaaaattagctggatgtggtggtgcacacctgtaatctcagctactggggagactgaggtgggaggagcacttgagcccagtagtttgagacttcagtgagctgtgattgtgctactgcactccagccagcctgggtgacagggccagactcatctccaaaaatcaaacagtttttacaacccagtctccagcccctctcctctgcctggaggttgggggtaggtgggaaggtgagaaagttcccaccttattgtatgcttggtctttctggtgaccaaccccatcctgaagctctgtatcaggaagcgggacaaagaccacagtccccaaggctctgttttactgttatcattgcctaatggtgtgtttcttatgaaactttgaactagttttccaagcagtgcagcttcatcctacagagaaacagttgaaggtgcacaagctgacaaccagcgaggtccctcctggtggcaacacccagaactagaagaggatgattttgatttcttacccagcccaacccccaaaccttttccccagttctgatgggtgcctcctctggaccccaaaacatgagtatgtttatagctgaaggagatccaggaccccagaggccactttggctgatggtaggcctcttggaatccagctgggtcgtggggtcagggttaggttccctgggcaggactggaggagggacagtccacagagagggacacagtgctgagggctgccaagtccatggtggcagagaccaaagccaggcaccaactgtgggccagggcccccaggctgggagtcaggtggctaggcctcaggctgctgtgctcaaagcaagagccctcagggatgcgtggagatagctgggccccaggcccatgcccatgccagcagtgatggctccaggcctgtcttgatgggtccagcaagcaggggttgaatatgtatttggggccagctaatggaaccaggattaggaaagaggacctccactgtgggacaaatactgagtgccccaggaactttgctgggggggcccttcctggattgctgagcaggaggcagcgtgcagaggtgtgcaggactgggtccatacccacgtgggccacccaggacaggccatggaacctgagcacgttcttctcaaccccgctgagcgtcagtgtcctcaactgtaaaacaaggcttgctgtgccaatctggagggtctgttgtgaaagttcagtgggaagacagacccctaatacgtgctaattcctcgccgcctgctgctgtaagaaaatggtgctgaagttaccatttgcatttttcagtttaccctcggatactggtgttgcaaaattatgttaaagtaaagccctgccccaggaactggagggcagagtggagccgaggcctggggagacggggtgggagttggggtaggggtgacgtgttccctgcagtctttggctgcttttgtggcccccacattctgccattcacacctctggaaaaggtggcacatggagaaaagatgagcagggggtgcagaagagtgggcctccaccaaggtactcttttttgtaaaccgatattgctttcctccaaagtctagaggttatgggaaagcagaaagaaagaccgcgtcagcctatctcagcaagcctggtgcttctccttgtttcttcatgggactttgcaatcctataggtttttgttgctttgggttttgttttttgtttttttttgttttttttgttttttgttttttttgttttttgagacggcatcttgctctgtcgcccaggctggagtgcagtggtgcaatctcggttcactgcaagctccgcctcccgggttcatgccattctcctgcctcagcctcctgagtagctgggactacaggtgcccgccaccatgcccagctaatttttttttgtatttttagtagagatggggtttcaccatgttagccaggatggtctcgatctcctgacctcatgatccacccgcctcggcctcccaatgctttggattttaagcttctcgtgggtgaactcctttctgccctccatggaggtctggccccggcttggttggccagagcctagtgagatggcggtagctgtggacacagtggcagccttgttcattatgctcgctggggctgcttggttgacctggactccattccctaccatgggcttctgcgtgttggcagggagaggaagggggcacaatccgaagaccagcctgacggggcagacggcttctggattgtgaatgagtcctcttcctggcttaggctcctgtaatagcaaggtcaagaccacagctctgcagatgaggtgtcagagtgggctggactgggcaggtccgaatttctcaggcccggctctctgcgccctgctgtgtcttagctgtcccctaggggtcagtctgagactgagaagaagcgggtgcctggatcactacgtaggcttcccagatgcccccagggaacgcaaacctgaggcatgatttgaggaggtgtggggatgacacacagatgggatggcaggcgctccatccctgtgccatgcgtgtatgttgggaggtgaagcttgtttttcgggcacagccccctcccctcagggtgtggacggagacctctgacttaaccactggatgtggctcgtaattaaagcagtgaatgcttgagtgctggctggtgggccagcagctgccacctggcccctgagagcaccctgcccttcttgaccccctcccaggccccgagaagcctctagcgttgggcatcaagcaggggcccctggggttgctgtccagacctcaggccagtgcaagtctatcccgggcagttgatgcctggatgcaccagttcctgaccttactggatgtggctccacctgcgtccccagagccctgcgagaccctggcagagggaaactttgaggcttgggaaccccaactgttgagcaggctgttgagagagtttcctgacccagggaaatttgcttctggtcaaagggaatgttaggtgtgtcctgaaggactccccaggttccctgggtccatgcatggggtccctggaatcgccctgggagtccctctgagactgtcctgctcaggctgcccatcagcccccagtccatatgctataggggcccccgtggggagggggcatggagacacgtggagagcccgacactcgggtgctaaaggcaatgggatagttgctaggggcccatggtcacccctcagcaggcggtaatgtgaaccctaatcctacaagtgctgtaaggccctgggccctgttcatccaccctatggtggatgaaatggagagggcatccagccacctgcccctcctgtgtagccaccacgccagcaaatggtgtcagtagcctccaacccagagagtcatcctcagcgcctcctcatgcagctgccttgagtcctctgttccccactcacccctgcctcccccttccatcacagccactgccacccactgaccgggcgtcctcctgtcctcagccttcctctctccacacccccatcccgctcctgggacccgtccttaccaagggatgaaaaccaacatcagctcctacccactactctagcctcatctctcaccatggtgcatctcacacctaaaactggcgataccaaaccgctccccgtttcctgagaaagccatgttctctcttgcctctgagtgttatctttctcctaggatgtcctccctcccgcttccttgtcaggagctaacgtctactcacctttttaagacttacttgccgggagtggtggctcatgcctgtaatcccagcactttgggaggctgaggtgggaggattacttgagcccaggagtttgagaccagcctggacaatatagtgagactgcttctcttaaaaaaaaattttttacttaggtaccgcctcctccaggaagcctccctgactccttctgccccagcccaaaggagaaggacctgcactgagcttcctgggggcccttcaccctctaccactgcctgaacctcacccttcatgacagccagccccatgtccacccagtggcttcagggctcaggctgagctcctccttttcacccccaggacagcacccacagcaagcatcgttatccatgctccttgggtgtgtctctaagtatttctagaactaggtatctggaagcagaattgctgtgtcaaagggtatgtagattttgttttttaacagatacggatgaaattttcttccacaaagcctgtaccatttgtatcacccaagcactatatgagattgcccctttccccatggccttcgccaaccccggaagccatccatccacctgctggtctccggctcagcagcctgaggggaggaaagcccattgctgccgtcctctgtgctgcccagcttcctagggaggcggaccatctttttcttatcttcccataccctctggatttctgcttttacgaattagctattcatattctttgcccattttcgatatggttgtttgtcttttccttattgatttataagaaatctctgtatattctgttttttgcttgtttgttttttgaggcagtctcgctctactgcccaggctggagtgcagtggctcaatctcagctcactgcaacctctgcctcccgggctcaagcgatccacctgcctcggccccgcaattagctggtaccacaggcacacgccaccacatccagctaatttttgtttttttgtttgtttgtttgtttgttttgtttttggtagagacagggttttgcatgttgctcaggctggtcttgaactcctgtgctcaggtgatctgcccacctcggcctcccaaagtgctgagattacaggtgtgagccacagcaacaggttgaaatctctatatatcctgattatcaatctttatggattttgcttgtgttttaatcttgttttaggagtgttttattacacagaatgttaattctgatgtcatcatttatcaacctttttatgccatttgcattttgtgtatcattttgtgccttctgtacctccaggctataaacatattctcctatatatagttttcagatacttttgagaaaaagaagtatttatgcttagctctttcatccacctggagcttatttttgcttttggtgggagtagagatctggcactcttacttcctcaatatggccagtactttgagttcctaatgttgaatagtccctctttctcaattgatttgaaattttatctttattgtatgctaacttaccttatatacgtaggtctctttctggactctggtctgttatattgatctgtttgtctacctacttttaagccaaaaccatagtttcagttactcttgtttatagtttgatatctgatagggaaaggctctctcatccttctttgtttctttaacctttaaggccaggtgcggtggctcatgcctgtaatcccagcactttgggaggccaaggcaggtggatcacccgaggtcaggagttcaagaccagcctgaccaacatggtgaaaccccatctctactaaaaatacaaaaattaaccaggcatggtggcacatgtctgtaatcccagctacttgggaggctgaggcaggagaatcacttgaacccgggaggcggaggttgcagtgagctgagatcacgccattgcgcttaagccttggcgacaaagtgagactctgtcatacacacacacacaaaaacaaattaaaaaaactgtttttttgttattcttacatattttctcttctggaacagcctttttgtcaagctctattgcaaatcctgtaggagatcatatttgaaattaaatttgtgcattaattgaaggaaattggcttctttacaatattgcattctgtcatccaggaatgcatatatcttttcatttattctggccttttatgccctctaggaaagttttctgttgtttttcttttttggttttttgggttttttgagatggagttttgctgttattgcccaggctggagtgcagtggctggatctctgctcactgcaacctctgcctcccaggtccaagcgattcccctgcctcagcctccctagtaggtgggactacaggtgcccaccaccatgcccggctaattttttgtattttcagtagagatggggttctactacgttggccaggctggtctcaaactcctgacctcaggtgatcctcctgcttcggcctcccaaagtgctgggattacaggtgtgagccaccgcatctggccggaaagttttataattttcttaaataggttatgcacactttcttcttagggtgactatatttggagtttttgtgctgatatgtgtaggatctttttgctatgatattttataactggttacaactgatgtataggataggttttcatttttggtgttaatcttgtcatgataaccctattaaactctccttattttatttatttatttatttatttattgaaacagggtcttgctcttattgcccaggctggagtgcagcagtgtgatctcggctcactgcaatctctgcctcccgggttcaagcaattctcctgcctcagcctctcgagtagctgagattacaggcgcccacgaccatgcctggctaatttttgtatttttagtagagacggggtttcactatgttggccaggctggcctcgaactcctgacctcaggtgatctgcctgctttggcttcccaaggtgctaggattagaggtgtgagccaccatgcctggcccattaaactctctttatatttaatagtttatttatatgctattttctatcatgcttaattctatataacaaggtagccatgctgccattttaaattttaaatggcaacatgatatttcatcacatgaagacaaccaaatttatataccagtttcttattgttgggcgtatatacactttttttttttttgagacggagtctcactctgtcgcccaggctggagtgcagtggtgcaatctcggctcaccgcaagctccgcctcctgggttcacgccattctcctgcctcagcctcccaagtagctgggactacaggtgcccgccaccacgcctggctaatttttttgtatttttagtagagacagggtttcactctgttagccaggatggtctcgatctcctgacctcgtgatccacctgcctcggcctcccaaagtgctgggattacaggcgtgagccaccatgcccagccaggtgtatatatatatttttaacgtaatttggggaatgaacaaaagcagtgtaataatcattcttatagctaagtatttccccacagcagcaatcgttgctttaaagtaaatcagaggttggcaaattacagaccccacgagccaaatctaggagcttgttattgtaaataaagttttactggaacacagccacacccatttgttcacatcttatctgtggctgttttcacactacagtggcagagctgaaaagctgccacagaggccaaatggactgcaaagcttagaatatttactgtctgccctttacagaaaaaatttgccaacccagacggtaaattcaggcaagtggaaactgttttatgaaaaggatgcaaaggctgggcgcggtggctcatgcctgtaatcccagcactttgggaagtggaggcaggtggatcacctgaggtcaggagtttgagaccagcctgaccaacgtggtgaaaccccgtctctactaaaaatacaaaaattagccaggcgtgatagcgcatgcctgtaatcccagcctctcgggaggctgaggcaggagaatcccttgaacccaagaggcggaggttgcagtgagctgagatcgtgccattgcactccagcctgggcaacagagtgagactctgtctcaaaaaaaaaaaaaaaagaaaaggatgcaaaatattaaaactgcctaatactaatctgccaaattcctctgcaggaatcccatcaggattgcgtcagattcctgctacccttttgatactggtgttgctgagttttcagatcctttaaatttgagaggctaaaattagaacccctcttttgaattataatacagtttaacttcttaaagtacattttttggtcactaagagggcgttcttcatgaattgcctgtcgacattctccaccctggctatgtttacttctattgagtattttttaagaaccagaaatataactttttgacatacattaaattttttccagcttgttatttatttttaactttgttcatgataccaaatttaaaaatttttatagccaattcatcattcttttcctttatggcttcagcctttggtgtaatgcttataaatgctttcccgcccaagattgtgaaactgttctgttttatttttgtgtatttgatttttaattcgtagaattgactgatgtctagagtgaggtagggatccagtttgcctttttcctgtcagttcctcttgccctccctcacctggctggaaccagcagcttcttgctaggctatgcttacgcacgcagtcccctgatggcaaaggaagtgaggtttggcccggtgcagtggctcaggcctggaatcccagcactttgagaggccgaggtgggcagatcacttgaggccaggagttcaagaccagcttggccaacatggcgaaaccccatctttactgaaaaaaaaagaaaaaaattagcctggcatgatggggcatgcctgtaatcccagctacttgggaggctgaggcacaagaatcacttgaacccagaaggcagaggttgcagccagcagagattgtgccactgcactccaggctgggcaacagagcaagaccctatctaaaaaagaaaagaagaaaagaaatggggtttgctgggaacccagacctgagcctgagcccaaattggctcttttgctcatattcagaaggggctttgccaaacccttgtcttcctggaagtttttaaaatgatgataacctgtgcctctctctagaacttgctggggaggaggcctacagcctgaacatctaagcccaccctcgcttcatttcatccatcctgaaacaagcatttctaaaaccactcatgacaatggcacttataagttctaaaaatacttttcctgacaaacagcactgtgattcactgtgctggtggaggtgtgggtggggtgccatgctcccactggtgtggtggcaggagggagtttcagagcccagggaagcagcctttctacttatatctggccccaatatatttttctatgtttcaacacccccccccacccttctaaagagaaaaaaaaatctacttatcccaagcctcagagcttctgtaagatcctcgatttgtgtctttgggaaataactcaactctgattaagccaaaggtggcggggatggaagcagtgcagatatggaagccccttttgttcgttgcctcagcctggtctgccctggaccgtgtgtcttctacctcctacccctgaccatccctaccctagagacgctaagctgagctggccagcaagtgctacttcccacgggccacctcctgcctaacccaaccctgacgcccaagtccacatgtatctttagaacctactcaccaagttagagcttgacaaaaccttggagaggctccttacatcccgtctttttaaagctgagcaggagggaaaaatttgggttttatgaacctgtaggacattaaccaccttcgtatatacctttccagtctcatttcagcatcctttctttccctgattacatagactttgatccctccccttctcctttggatgagttatccctacctgctgcttccctcattaatgagtctagtgcagtgcatttttgaaacagtaactgtgggaaacacacaaacacaatcacatgagggcagatgttctccgagaaagcacggtcgaaaccagtggggactctgggttagcagggcctatggtgcttcatgtgtcagaggctgaactgggatatcagtggagattctaaactcaccatccagtttataaacctctgagggcccaagctcctgctgcagatggtgcaagaataaagagtagatcacttttactaaacaaagacctagagagttgacttggtctccaactttttattttgaaaattttcaaccttcagaaaagagcagaacaatgaatccacatatatcctttgcttggatgacagctgttaacatgctgctaaactgagtttctctgcccctgtgtttgttggtggggtgcatgtgcatacatactactttttttctggaccatttgaaagttagttgcggacatgacacttcatccttaaatacttggccattcctaagaaggacactctcctatgtgaccacaatatagttatgacttgcaggaaacttaacattggcacaatttgttacctattgtaaaatctacattcaaattttcccaattttatatatatatatatatatatatatatatatatatatttttttttttttttttttttgacacggagtcttgctctgtcacccaggctggagtgcaatggcgtgatctccgctcaccgcaacctccgcctcctgggttcaaacgattctcctgcctcagcctcccgagtagctgggattacaggtgcatgccaccactcccggctaattttttttttgtatttttagtagagactgggttttaccatgttggccaggctggtctcgaactcctgacctcgtgatccacccacctcggcctcccaaagtgctgggattacaggtgtgagccaccgcacccagccatcccaataatatttttatagcttttatttttatctcaaatctaatacaggatcacacagtagtttagttgccatgtttctttagtttcctttaatctagaagagttccttggctttttttttcttttctttctttctatttttttctttttttttactcctaatgacattgacctttttaaaaacttcaggccacttgcttcgaagaatgcccctcaatttagatttgcctttattgattttctggtcctttggggtactgcaacttaaatttaaattaaaaataaaatggtgtggcgaggagggggccaggaggggagttctactgtgtttatttttcaagtctaaaacacatttaaaatgcatattgttggcacccactcagtgggcctcagttttcccagctgaaacatgatctaaacaccccttgcagcttctgtcccttctggcatttggggaaaaataaatgcctaattgtgtgtgtgcggccgagcgtccacccttggcatctctcaaattgtggggaggcagccggccttggtactttctggctccaggaacacgccatgggccattgaacgtctgtgcgatgggtaacgtctgtgcgatgaacactgtacactgggtacagtgttaggaggtgtgggctcttatacatgaccaggccacatctccatcctctttgggctgagattaggacattggagtaggtgtatttgtctcctgagaggggcaatctcaagagaaaactagaaaagaccccccccacgtctttggggggattatctgagataatgtggggaagaaatccaagcccctaagatacactggacggtgcttctccgggtacctgtgcccgagggagataccagccacttgctgggacaccagggggcatcttcctggagcagcagattgcctggaagaattggagaaaacattgtccaacattaaaacaaacatggaacataataaacatattttgaagataagaaagaagcctgtaatcccagcactttgagaggcccaggctggaggatcccttgaggctaggagttcaagaccagcttggacagcaaagtgagacccccatatctattaatacaaaaaagacaggcgggtgccgtggctctcgcctgtaatcccagtactttgggaggccaaggcgggcggatcacgaggtcaggagatcgagaccatcctggctaacacggtgaaaccccgtctccactaaaaatacaaaaaattagccgggcgtggtggtgggcgcctgtagtcccagctactcgggaggctgaggcaggagaatggcgtgaacccgggaggtggagcttgcaatgagccgagattgtgccactgcactccaacctgggccacagagcgtgagactccgtctcaaacaaaacaaaacaaaacaagacaaaaattagctgggcttggtggcaagcacctgtgtgtcccagctacttgggaggctgaggcaggaggattgcttaagcccaggagattgaggctacagtgagccgtttgtgcgacagcactccagcctgggcaacagagcaagatctcatctcaaaaaataaagtaaaataaagataatgagaaagacttttatcaattttattttactttattttatttatttatttttttgagatggagtttcactcattgcccaggctggagtgcaatagtacgatcttggctcactgcaacctccgcctcccgggttcaagcgattctcctgtgtcagcctcccaagtagctgggattacacacgcgcacccccatgcccagcaaatttttgtatttttaatagagacggggtttcaccatgttggccaggctggtctcgaactcctgacctcaggtgatctgcccacctccacctcccaaattgctgggattacaggcacaagccaccgcgcccaactgctgtattttatttttgagacaggatctcactctagcacccgggttggagtgcagtggcgcgatctcagctcactgcaacctccacctcccaggctcaagcaatcctcctgcctcagcctcttgagtagctgggactacaggcatgcacccagctaatttttggatttttggagagacagggtctcactatgttaccctggttggtcttgagctcccgggctgaagcgatccacctgtctcggcctcccaaaatgctaggattacaggtgtaagccaccgcgccctgcgggaaagactttttaaattgttttgctttagaggctgctctttcgagtcccacttctactgtagacccatgtccatcttctgctgtggggccgctttatgtaaggtattactgttattgctattttgttttccttttcttttttttaagaaacaaagtcttgctctgttactcaggctggagtgcagtcactgcagcctcaacctcccaggctcaagcaatcctcccacctcagcctcctcagtagctgggaccacaggctcataccaccacatccagctaattttttttttttttttttttttttttttgcagagaccgggtctagctatgttgcccaggatggtctcaaactcctggcctcaagcaagtctcccagctgggcctcccaaggcactgggattacagtcatgagcaacctctcctagccctgttttcttgtaataaagtaaatgcagtgttcattttagtaacaaaacaggtcttcactgggagggagaaatgaggaaatttgaccccgcgtggctgaggcctggaatgagctccatgggcaggctccaggaatgatgtaattttgcctcctctcaaggctggcctcaaggaggcctgattccagccctctttgtctggggctgccctgaacctgtaagaatccttctgaccagatcctccagacactgcaaattctcacccaggttgctcagaatcctggaaagagctcaggtttgagtcaaacgggctgagtgtgggttctgcttgaccactttctgtgtgtcatttggcaagtcgcttcacctctctgagcctttttcatttctgcctatctaaaatcagagtcgtcagcctgattttcagtgttgtggtgagaatgcaatggattaatgtttctaaaggttcctgaggagacaggtcccccagtcagtagtacctatgcctgcattctctgtaccactcagaaccctcaggggaatcattcaggacacaggggacagaattccctccccttcccattcccaaagtcaccagcctgcctccacctgcacccacactttcagcttgctgctgggatggtgagtggcatgaccctgctctgacacaggccatgccctccaatcccagctcctcacccgcacaccgcctgaacactggatcccagcccctcctgccaactcaagcactcgccttcacaaacagcccctcacccacagcacccgcaccacgcccctgctgggtcctttccattcgcttctggagctgacataataatgcccttcccatgggcagggaagcacccgcttgaccacacatcctggctttctttcctttggtctatttcctccaaagactggtctcaactccctttcttgcctccctttctctctgttgccactcccaatgatgtcttggcccctctgttctgctgaaacacttctcacagtcaccagggacttctttttgagacaggggtctcactctgtcacccaggctggagtgcagtggtgcagtcctgactcactgcagcctccaacacctgggttcaagcaatcctcccacctcagtctcccaggtagctgggaccacaggcatctgccatcatccccagctatttttattttttgtagagatgggggtcttgttctgttccccaggctggagtgcagtagtgcagtcctagtttgctgcagcctcaaactcctggcctcaagcaatcctccaatctcagacccccaaagtgctggtatggcaggcatgagccaccttgcctggccaccaggaacttctcactggccaaatccaagcatcagttctctagtcacatttttacatagtgatggtgtgtggtgaatagatcagggtaattagcatatccaccatctccggcatttatcatttcttcattttgggaacattcgatagtctcctagctactgaaaactctgtattattgttaatgatagtcatcttacagtgatgtagaacaatggaacttatccctcctctagaactgtaactctgtacttttaacaaacgtctccctactctccttcccctgccattctcagcctctagtgtcctctgctccattcacattttactggaaccctgggcagggcctggcacagccaacctctcccttctcagatcgtccttttagctcaagccttcctcctacctctcaggctgcttttctccccgcacaccacccccccgccaccggctttattattattattattattattattattattattattattgagacagagtctccctctgtcacccaggttggagtgcagtggcgtgatctcagctcactgcaacctccgcctccggggttcaagcgattctcctgcctcagcctcccaagtagctgggattataggacggcgccatcacacccggctaatttgcatatttttggtagagatggggtttcaccatgttgcccaggctggtctcgatctcctggcctcaagtgatctgtccacctcagccttgcccgccctcctcctgggtccctttaaatggcgctgggtctcaggcctcgtcctcacccctatgcttcctgcctgcccactccccaggggagctggttggtcccagaactctaaaagcaccattaccctgagggctcccaagatagtattttcccctccgacattgccttcggctccagtctcttctgtcaaacctgtggcgcaccctctgcatttccaccatgttccaggctacaccctttgatctgatccagctccgtcccctcagccccaagaatgtttccccaggctccccatctcagtaaatggcaccacctcccctacctggtcactctgaccaaggatcaagtcatccttaatttctttcctccttccacatccaacccatcatcacagcctaatggttttacctccaaactatgtcccgagccatccacttccctccaccttggaggttacaccccagtcccagcagagccgcaccctgtacctgtgccccgatggcctgcattctctcttgttttttgtggtccatatgacaccggagtgttctttaaaacttgtaactcctagtggctgggcatggtggctcacacctataatcccagcacttttggaggctgaggcaggtggatcacctgaggtcaggagttcgagaccagcttggccaacatggtgaaaccccgtctctactaagaatacaaaaattagctggccatggtggcaggcgcctgtaatcccagctactcaggaggctgaggcagaagaatcacttaaacccgggaggcggaggttgcagtgagccgagatggcgccactacactccagcctgggcaacagagcgagacttcatctcaaaaaaaaaaaaaaaaaaaaaattgtaagtcccatcctcctctcccttgcataagagcctccagtgacaaaatccaaaaccctgacttcccactgtggcctcgaaggtttcacttttgcctgaatctttgaccttgcccctcccagattcccggtgactctcactgttcagccaccctgacctgttttctgttcctcaaactgcccaagcgagttctgcacagggcctttgcctggcttccccttcacctagaacccttgtcccccaaatctttgcacagctgcccttgtgcccttcaggtttcagcacaaatgtcacctcctcagagaagccttcccccaccaccctctcaagaaactccctccccaccctgcccccatcactgccagagcaccctgcttatttccttgagtatgcaccactgttagctgcatgtttttttaatggctgtgtaatagtgatacatgtttttgggatacatgtgatatttcgataactgcatatgttgtgtaatgatcaaatcagggtaactgggatatccattacctcaaacctttgtctttgtgttgggaacattacaattcttctagctttttgaaagatacaagaaattattaactataatttccctgctgtactagcaaatactagaacttatttcttctctccaactgtatcttgtttggcacagtcttgatcatctatgtgtgtcctgtcatcccccactggcctgtaagctccgtgggtccagggctttgccagtgtcattcactgctgcacagtgcctggcatagagaggctgttggtgcagatttgttgcacaagcagatggatgaatctcagatgtggaatgttgactctttgtcagggagggatgggctcccacctaggagtctccgaggaccagctcaaaggctgtaaaaatcatgccctgcctcagtgctctgggggattagaaagggggtgcctggattctctgagactctgcagctgggctctctcgctttcctgtgcgtgtcaatcactgatcttaagaaaatgcagattctggttcacaggcctgggtctgcgttcctagcctgctcatcagcaatggtggtgctgctgacctcagatctctctagcagcgcttttgtaacttgcaggtcctgtgccatctttccccctacatgccatgggaccacgcggaaagagccagaggggtcccttcattgcctcctctgcccctcctccctccatccagcagcaagtgttatttgtagcagtcactgtcacctccgcatgtggtgaggcctgctaggtttctgtctccacatttctgttactgtgacagacaagacggattctctgccaggaactgtgctcagccacttgcttctggcattgctgtttcctctctgtgcacctcttattcaggcagactcctgggggatgttgcccctgctggaagtcaggcccagttcattgccctagtgtgggatggggcagctgaccccgcggggaactgggaggcattaccgagaggtttccaagctttggtttcaggagtacaggtataggcctacctgactggccctgggggcaaaatgttcatttaaacttggggagaggctgggcacggtggctcacgcctgtaattccaacactttgggaggccaaggtggatggattgcttgagcccaggagttggagaccagcctaagcaacatagagagaccccatatctacaaaaaaattaaaaagtagccaggcatggtggcgtgtgcctgtagtcccagctactcaggaggctgaggtgggaggatcacttgagcctaggaggttgaggctgcagtgagctattatattatcacacgactgcactccagcctgtaccatagagagagaccctatctcaaaaaaaaaaaaaaaaaaaaacaaacctggggagagtttgggacctttggagtccaagagttctgagtttgaatcctgatgctgtcacatactacttgggccacgccgaacaaggaacttagcctccctgagcctcactttcttcacttgctagatggaggttgtaactcgtgtcttcctcccagggtcgttgtcaaaatgaaacatgaaagtgcatggaagtaggaggtcaaggcaggtgaattacatgaggtcaggagttcgagaccagcctggccaacatggtgaaatgctgtctctgctaaaaatacaaaaattagctgggcgtggtggtgcatgcctgtagtcccaactactagggaggctgaggcaggagaatcacttgagctgagatcgcaccactgcactccagcctgggcacaagactcgtctcaaaaaaaaaaaaaaaaaaaaagaaagaaaagaaaagaaagtgcatggaaggctctccgcactgtggaaaatactggcatttctcaactcacaatgcatagattgtgagacatatcatggtccattgaatatcttttgactcaggggtggtgaccaggtgctgatagcaaggcctggggcccagtcctcctcccacaaccgcatcccccccagccccacccacagccacctgctgctctagcactagctagaaaagtcagcccctgggcattctcaagaattgagcccacccctttgtcagaccattctcccagggcagagactggcctgatcacatgaaaaccacacctgccgagccagagggcaaatgctccaacattgtattagagagattaaacagctgttctcaaccagatcattgctacattccatttcctgaccaggaaaatgaaaatggctgtcatagaagacagagcataaagtctgattcttttctttttgagatggagtctcgttctgtcacccaggctggagtgcagtggtgcgatctcagctcactgcaacctccgcctcctgggttcaagcgattctcctgcctcagcctcccgagtagctgggactacaggtatgtgccaccacgcccaactaatttttgtatttttaatagagatggagtttcaccatgttggccaggttgttctcgaacccatgacctcaagcaatctgcccaccttagcctcccaaagcactgggattacaggcatgagccactgtgccttgcctaagtctgattcttaagatggaaactcagtcaggcggccatggctcatgcctgtaatcccagcactttgggaggccgaggcaggtggatcgcttgaggtcaggacttcaagaccatcctggccaacatggtgaaaccccgtctctactaaaaatacaaaaattaatcaggcccggtggttcctgcctgtagtcccagctactcgggtggctgaggcaggaaaatcgcttgaacccaggaggcagaggtttcagtgagccaagattgtaccactgcactccagcctgggcaacagaacaagactccttctcaaaaaaaaagatggaaactgtctgtgggctctagggaggcagtggaggtgccaggtgaactgacgattagcaccacagtgggaacaggcaggaagaggactggtctccagtctctggtctcctgtctgaacaagtctgtaggggaggaaaaacttctcctctacccttttatgttatgtctgcagtctgcaaataaaattgagcaaagacagattaatagaaaaaaggcatacgaattttattgttgtttttaattttacatgcatgaaaagccaaagagatggtcagacccagggtttatatacaattttgacaaaggaagataagttgtgggcaagtaactaaacaaggaagagggggatttgggctcctaagggcagtatattctgggaaggtagctaggaaatgtgtgttagattgggggtggtggtttagatgtgttatacagatacataacctccccattggatttattctccttttcatgggacgggagaggggggcacatttacaaatggaaatttatgccctactttcaggcacctaaggggagggcagagagctcatcctgtgtctgctgtttctcagttgccttcagctcaaaataatccttatgccaaagtggcgtattgcagggtggcatatttggatccccttcaagttcctgcctcagtcccttccccagtcctctgccttgtacacatgggtacctcactgtacctactcaaactaggtctcctttgaccacagggagtgggaagcggagcatcctctctgctctgataatgtgttgataattggttgactttacaaccaatatttcaaaacaactgccttatcgagcccagcctggggtttctgtcttgtgctgtgacttgcaacattcttggtcagaccccttctcctcaagggaaactttaatctaggctgaaggggcctctgagatgggtaccaggcaggaggcatgtcaggacccttacctgctgcagtgaatgtcagctttgccaccttcagggctgacgctcccaaggcagctgcactcaccctccgctgacagtgccgtcctgggcttacaggcagaggctcagctctgacatgtgatatcggagaaagtcagtcatcttcagcatcttcaggtcatgttaaccctattcctttagattttccattatctatcctaataccaagttccgtgtcagaaagcgctgtttgctcttacctccttgcaaatacgtctttactgttgtacattttgtttttattctcacggctcattgaatattgcttcaatttcattagaattgctacaggaaaccttacagctgatttgtcatcctgtgtactctttgatccaatacattctttttttgagacagggtctcactgtcacccaggctggagtgcagtggcacaatcttggcccagccttctaggctcaagcaatcctcccacctcagcctcccaggtagctgggactacacacatgcggcaccactctcagttaacgtttgtattttttgtagagacgggctttcaccatgttgcccaggcttgtctcgaactcctgagctcaagcgatccgcccccctcagcctcccaaagtgctggaattacaggcgtgggccaccctgctggcccctagtacattctttttaggattttgtaccagaaaagaagtccttcctgatgaaatgatacctttttacatcagataacaagagttacagcataactatccccttgctgtcctttttggttttggtaagtcagaaaacttagagctaatgagactggtgaatcaataaaatctgcctttccatttaatcatttacctcctttttctctatggtttatttttatttttactactctagctatgaatgtgtcttttattgtaaataatttcatagctgtcaggaagagataaaaaggaatcttgatttactaaggagagacttattaaaggattattattgcctgggggtggtggggaggggactattccaatggaagcgggagcattgcagtgggagagagcactgaccagaagatcctcctgcacctccaaagttaagccgaaagggttgttcttttctaggcaagagtaaacaaggcttgaaagaactggtgcggggaggtaggttgaaaaggtggcctggtcctgggggcctgtcttaatgcaggccaacctgtcctccggagggctgtaaggagggatagtgagttgctcaggtgagggtggccaaagttcacagaactgggggaaagagagaaactagagtttagttaacaagcatcgtgttttaggtagagaatgggaatttggagggccttcctcacaggttctcgactgtgttctcctgggggacgaggaccagcttcatggcttgctgtgccctgcgctgggcctgaccaagttacttggtccctgtttgttcactgacgttgactgagggcctttccagagtcaggagctgacctctcacagagattccaagaactagcaggtcacactctcacctctccccaggggtccccagttccagccatgccctgtgtcctctccttctcctcaaaggggtccccaggcctaacctggggaagcactatccattccctctctcaccccaccccagtcccccctggaactggcttcctgcctgcttcttcccctttctccggggtggggcgggacaaggtggagggagagtgggaaggagaggaggagtcacccagctgcctcctaggactgataagagacccagcgggagctttgaaggctgttacagcctgggggtgggagcaggcctgacccccaccaccctcacccccagccccgcaggtggccacacccctcctgctgccctaccctctgtctctcaacttggccctttctgtgcctctgtgctctctctctttgtgtgtgtctctgtctgcatgtgtgcctccctctccgtccctgactatcctcccttcctctctctccttttcccctccccgctctgtctcttctctctatctgcaccccatctctctctgtcctgaagtctgcattctcaacacagggaaccttccagtctgacccaggtctcagcaggagccagacaaaaggccttgagggaagggacagatggagtgtccccatgctaatctcctttaaccacccccagcagaccaaccctgccaagtaggtactgtggtacccatttcgctgatgaggaagttgaggctcaaacagcagttaagacgtgtgtccaaggccttggggccacagtgtgcagggccaggatttttagctgcatctgatccagttgcctcagattgcgggctgagtccacctttcctgaggctcctcaggtgtcccaggcctctcctcactccctccaccccatccctggaggcaggaccagaggactcctttgaggagctgcatagcttgggagctgcgcatcaggagcatctgcagtgctgcaggaccatcttttacccagaggcatgaagcaaagtatcatgggagccccgcagggcattgcggggaggcaagattctcccagccccttcctgctgcttttggaggcctgaagatggctctgacctggatatagggggtcctaaaatggaagccctttggttgaagaggcaggtggcactgagcctgccagctggggctgtgccaggggtgtttggaggtgcctctcagaatgggccttctctgcacgggagcctgggagatgcatcaaggaaagatgtaccagcttcctggctgtggggcttctgggggtcttcaaaatgctcatgtgcacctctgggcctcccagcacagaggtggaggcagtttgccaatgttctttcctcttggaacccttcatgcaccagcatctttgtcacattagtgaagaatggactggccttgtgggtcacccagggtgtgaaacacgtttggggcgaagctgccacttcctccccaggagaaaacagaatgtggcccttgatagcagtgtggggtttagctggcagctgttagcccaggagctgaagacctgtggctacatgcacagtcatgtgtgtgaatctggtccctctattagccagggtcactgctacctaactccaaggggcactattatcactgtagtctatggaaattgtgcagtacccaacctgtgcagctgaacatggtagtcctgatctcaactctcactcatcatgtctgacagttgcaatggcctctctgctgactttctgcctctagtctgttccctctagtattgcctacaccccctgccccgtgtcaattccccagtcctacccacctccaagtcccttctcccctcagccacctgtcagagagatctacgagtactctcagctgttcagggatcctgggagtagactccttcctctgagatggatgagccatgtggtcttgggcaaagcacttaacctctctgagtaaccccacactggtatcacttattctcatttataaaatgggggtaaaatgcccatcaggttgtagttttcttgatcactagattcttaactccaggaggccagatactctcattcctctctgtacccacatctgacacatcctcagttccggtgagcgttttattattattattattattatttaacatgaatggtaccataaagcatttgttgaataaatgagcgcatgtcactttgaccaaaacctttctgcagcttccactcccacgcctgatgggttaactcaggacttcccaggcactgctgccctttctactcctgggcttttgcccatgctgttccctctcctagaattccctgtttcttgcagcactgtcatctttgacacagctcggctgccacccagaagcttttccagcccctccccccacccaaagcagcctctttatcccccaccagtccctccccacggccccagatacctctgcctgacagtgggttgtgccccagaggggctcctctgttgttctggacacaggggtggctgggactttaccctcctggggtcccagggcttgtgtggagcctgggactggctcaggacagaagtacacagagtgctctggaaattggtggtggccacagtgctcctgcctgccttgcggtcactcccggccctctcaggtgcctcttgaggaaaaagccctgctgccttcccagacacaagcccaccatgggctgggacagaccagactgctaaaaagcctggctggaatgggatggggtgggcacttcatggtcaggctttggggtccattgaaaaatgtgtctttgggtctggtggaggagcaagcacgttggagactcatgcctgatgctttggcttactaggctgttgtttaaaaaataaagtgcttttcaaatgcttaactcagaacctgacccaaagtaagcagtggatcagtgtctgccgtccctgggagcaggtggtgtagactcaccttagagcatggacgtcaagagtcagaaggacctgggtccgaatcacagcttggcccttccccgtgagactttggacaggttgtgtcatctctgaacgttgttttctttgcctgttaaatgggcatgaccctaatgtactcctcagtcttgttgagaggatacaggagataaattagaagccgctggcatcagttaggatgtgtgttagagcctgacagcaagacagagtgctagaaatgttggtggctataaatattactacttgcttctattttctggcaaagaaccattaatttcttggacctcttcattttctctctccctccaagactagtggtagcaggtggctttctctctgggaccattttttcacagacacaaagttgagtgggtgtatatatagagacatatatatatttcttcaagacagggtctcactctgtcacccaggctggagtgcagtggtgtgatcctagctcattgcatcctccaaatcctaggctcaagtgatcctcccaccttggcttcctgagtagctaggactgcaggtgtgcaccaccacgcccggccatgtgtgtatttttaatcgcttcacaggagttaccacacacagctagtttacagcattgtgctgtaaatgctggctgggtcatgtgtcgagccccctaccacccacagcctcccctgtccaccaactctcaccatccacagacctccagagcccccacatacaccaccatgatgccccccaaatccacagacccctactcatagcccctgctgccaacaacccccctgactcccacccttagcttcctcaccacccttatagccccacctgtctgataaaataccttgaggccatttgcagcagaggtgcaggtgtgcagatgaggcagaaaagcccctccacacgcacaagcctgggcctggccttggactcagacatcatctacgtccacatctccatccaccctacaaagccctcaccagttcctgaggtgcacagctaagaaccatcaccacgataccaggcacttactgagcacttagcttggcactgagcactgatgtaagccctggatgctcaaataaaaatgcatgggttaccttgatgcaggacttctcagagctttaatatcccagcgcccctctggatgccaaagagggagatgagagtatgcagcatttgcagacttggccagggcaacctttcttcagctctggagcatacttaggaacattctgtgtccttgacattcctagtgtggtccatggactcatgcgtgtctcatctgcaaatcacctgggatctcaaactcccaatgtcaggggatccacctgcctcggcctcccaaagtgctgggatgacaagcatgatccactgcacccagccttttttttttttttgagacaaggtcttgctctgtcacccaggctggagtgcagtggcacgatctcgactcactagagatacagaatctcactacagatacagaatcgaaacccatttctactgaatgggaatctgcattttaacaccctcggagattcattcatgtgctcattaaagtttgagacacacttttgttggtcacagggctggaccttggccagatattggaatcacctggggagctttaaaaactaatgtggctgggtgcggtggctcatgcctgtaatcccaacactttgggaggccaagatgggtggatcacctgaggtcaggagttcgagaccagcctgaccaatatgatgaaacccccatctctactaaaaatacaaaaattagctggatgtggtggcaggtgcctgctgtagtcccagctactcaggaggctaaggcaggagaattgcttgaacctgggaggcagaggttgcagtgagccgagatcgtgccaccacactccagtgtgggcaacagagcaagactccatctcaaaaaaaacaaaaaacaaaaaaaaaaacagggcctaggttctacctccaaattctgatgtaattggtctgaagtttggcttggtcattgggagtttgaaaagctccccagctgattctgatgtgtggccagcagcatagatgagtgaacattagaaagggtctggagtatccgcttggaaatttgcagggaagcatttaaagtcttggaacagccccagcgaggcacagggagaacaagggactttcccgaggtctcatagctggctggttgcaaagcctccaccagcactcagtttcctagcaccagcctcggtccggactcttagcgtcattatctccacaccatcttctattttttcttctcttttattattttattttattttttgagatggagtctcactttgtcacccaggctggagtgcagtggtgtgattttggctcactgcaacctccgcctcctgggttcaagtgattctcctgcctcagcttccaaagtagctgggattatatgtgcgtgccaccacgtctggctaatttttgtattttagtggagacggagtttcgccatgttggtcagactggtctcgaactcctgacctcaaatgatccgcccgcctcggcctcccaaagtgctggcattacaggcgtgagccaccgcgcccagcctcataccatcttcttgaaaattctccctcctgatcctgagcctcagcttcagtcctcaaacaaaagccttgattgggttctgatcatgaggccgcctctgcacttactttgctggctgctggctcagggctccagcaaacagtcccaaagccagtaaagcttaagccatcaacatgaggaggcgttaacacattgtaaccaccagagcatagtcccattatgtaaggagtcctgctgcaaggccgctcagcttaatggagaacacgagactccaggcaggcctgggtttgagccccagccctggcacttggcagctgtgctgccatcatgacccctttagcctctctgagcctcatcttccctacctgtaaactgggcacaatggtaatcccctgctacaggtggtgtgcagatcatataagataaagaagacgatgagtcccgcagtgccctggcgtgtggtgggcactagatcagagttagttggggtcgttgagggctctcaattttggcaccaacacaggaggcctggggttctcagctggccccagcatctcaagtttccacatagcaagagcacccagaacctccctccaccaggccagaggcagccagcatgtgcctttctcttctcctcagctcactgcaacctccgtctcccaggctcaagcgaatctcctgcctcagcctcccgagtagctgggattacaggcacctgccaccacacctggctaattttttgtatttttagtagagacggggtttcaccatgttggccaggctggtctcgacctcctgacctcaggtgatcgctcgcctaggcctcccaaagtgttgggattacaggtgtgagccactgcgcctggactttttttttttttttttttttttttttttgagacagagtctttctctgttgtccaggctggagtgcagtgacccgatctcagctcattgcaacctcagcctcctggttcaagctattctcatgcctctgcctaatgagtagctgggactacaggtgcatgccaccacactcagctaattttttgtatttttagtagaggcagggttttgccatgttggccaggctggtcttgaactcccaacctcaggtcatccgcccaccccattctcccaaagtgctaggattataggcgtgagccgccgggcccagcctcttctccccatttgtttctcctgtgccagacccgcaggttcaaggatcatacttgcctgtgtttgaacatggctatgaggagacctgtgctgtcagtgtgggggacccccccagctttctcaggctgatcaagcagaagttggccatgccggccaacagttggtggcattcttcccatctcgtgggcccactcatgacagagcagctgttactgtcatggttattttatttttattcctccctctgggagcccagaatcaaagggaaacatcagcactgctgcctcattacagagagcagagaaaatggggatggggattggacattatctctttttttcttttttctttctttgagacggaatttcgctcttgttgcccaggcgggactgcagtgtcatggtctctgctcactgcaacctccacctcccaggttcaagcgattctcctgcctcagcctcccaagtagctgggattacaggcgcccaccaccacacccagctaattttgtatttttagtagaaacgaggtttcaccatgttggtcaggctggtctcaaactcccgatgtcaggggatccacctgcctcggcctcccaaagtgctgggattacaggcatgagccactgtgcccggctttttttttttttttttttttttttttttgagacaaggtctttctctgtcacccaggctggagtgcagtggcacgatcttggcttactataacctccgcctcccaggctcaggcaatagtcccacctcagccttcctagtagcaggaactacaggcacgtaccatcatgcctggctgatttttgtatttttagtagagacagtttcgccatgttgcccaggctggtctcgaactcctgggctcaagtgatctgcctgccttggcctcccaaagtgctgggattacaggtgtgagctacagtgcctggcctggatattctcatccagggcctacgggcagtcagtggagactatctggggtgacatattcatcttacagatggggaaacaggttgcacagagcctggaacttcccaaggctatgttgaggccagactagaacctggttctccaggctccaggtctgaggtctttcccctgtagtcaggaaggaatctaggttaggactccaaagtcctcctcaaccagtgtgtccatgttaaatgcagattcctaggccccattgactagcccaggatgtgggtggacctgggaatctgcatccttagcacgctcccctaaccaaagttctagaatgactgctgtgacctctttccattggccccagagctccaggcctatgctccgggactctgtgcttcaatcccacattacaactcaccattcaagaactgcagcccctcaatacggatggcaccctgttaaaaaaaaaaaaaaaaaaagaaccccagcccctgctgggcgcagtggtgctcctgtagtcccagctaatggggaggcaggaggatcgctagagcccaggagctctgggctgtgatgctctatgttgatcgggtatctacactgagtttggcatcaatatggtgacctcctgggagcaggggaccacagtgttgcctgaggaggggtgaacaagcccaggtcaaaaacagagcaggtcaaaactcccgtgttgatcagtggtgggatcgcgcctaccagtggccactgcactctagcctgggtaacatcatagcaagaccctgtctttaaaaaataaaaaaaagagccaggtgcggtggctcatgcctgtaatcccagcactttgggaggccgaggcgggcggatcacaagatcaggagatcgagaccatcctggctaacatggtgaaaccccatctctgctaaaaattaaaaaaaaaaaaaaaaatcagccgggtgtggtagcacgcgcctgtaagtcccagctactcgggagggcgagacaggagaatcgcttgaacccgggaggcggaggttgcagtgagccgagatcacgccactgcactccagcttgggtgacagagtgagactcggtctcagaaaataaaaaaagaatcccagcccctgactaatctacttcatttacagcattgcttatctggtgcacttgaggacagtgggtcccaggggaaggaggcagagacagtgtcatgttgtggttaaggacatacaccctggacccaggcagcccgggattgattcctgaatccgccacttctagtcctgtgaccttaatgtgtttcttcccctgtcggtgcctttgtttcctttcctgtaggtggtgatgccttcctcctaaggtgttatgaggattaaatgaattagtaaaaagtacttaggttagtgtctatcgcatagttatgtgctaagtgttagcagctgttacaccattttacaggctgagaatgttatgcagagagatgctgagactttgccgaggttatgcagactctgagtagcaaagttggttggggcttctacactcgtcccacatagttcctgcctgggcgtctaccgccttccagtgccaaccgtggctccgctggtagattatagcttggcagaaaaagaccctctgcactcccccattcactcatgtaccttcctacacactctggggttggggtaatttccccagtcccagtagccaggaaggcagagtctatggaaaccaggtggccatacagagcaaagttgagcttcccttagccctcagagtccctaatggggacccagggatgctaccaccttgagtctcaaaagctcaagctttattatgtcaattcttatttatactcaaagcttatttccatttttctggacaaatttacacttcaaatctctgcattttggtttaaaggaatgttctcaaacattggctctcctggctcttggtgtcaacaagaccacttccttccctgtctggagaagaaaatggagttaaggcccagtgtccttaaaccatacctcctgcatctagctcctgagtatttctttcttttcttttcttttcttttctttttttgagatggagtcttgctctgtcgcccaggctggagtgcagtggcatgatgtcggttcactgcaacctccacttcccaggttcaagcattctcctgcctcagcctcctgagtagctgggactacaggcgcatgccaccacacccagctaatttttgtatttttagtagagactaaaatgggggtttcaccaagttggccaggctggtctcgaatgcctgacctcaggtgatctgcccgcctctgcctcccaaagtgctgagaatacaggcgtgagccacggtgcctagccacttcctagtatttccagaaaaaaacagaaagcagtctcttcttggtactccccttcttcatcctgccctcagtctttctctctgacttaattctcttctctgagtggttctgatgctaagtttggcccagggacatgacagaagtctacatccccactgatctcagcctcagaatgggctttgtgagcacattctgaaactctccacctggggagagagtagtcccagctactctctctgctctgaggactgagggactgagtgaggccattcaagcctgtggagggcccaggcacacactgccccactcctgccacccaccgctctccatctcagtgcccaagggagggcagctccattaccgctcttttcctcttctcccatccctgctgtgatagaatctgccccgagcttggggcccattctaattaaggtaactgaatgcccaggcagctgaaaccggccttttgcaaaatagcaagtggaaggcctgcccttgaggcccagcctgccagctcctgtttgcccttgcctggtgttcgagatgactgggccctgcagccccagtgaaggaggggcctgggaaggggaaggggacagagagcaggtttattcggggtgagctgcgctggtccattgtagtttgcactcagtgcttccaggagctggaaaggcaaacaatagatttgggtcacgaggggttgggggaggagatggtcagatttagcaggattctgatgccaagtagctggtgcttagggctctgggctgtgaacttgggactcttctgatcagagcctctgtctcccttcctcgcttcgtctcccttcctcgcttcctctgctcagacccccacacacatgcaaagctggcctcaggcagacacatgccaccactgttctgggctcctttccttagatttgagaggcctggggcagagtggagagggctttggtcctgcatccaaatcctggctctgaatgtccttgcgcaggttatttaatctttctgtgcctcagccttctcatatgcgaaatgggaagagcaatgcattctctggtggatctgggttgtgtggggcctgaagctcttaccacatgtagagccctttttaaggtaaagaatttctggctgggcactgtgtctcatgcctgtaatcccagcactttgggaggccgaggcaggcggaccacaaggtcaagagattgagaccatcctggccaacatggtgaaaccccatctctactaaaagtacaaaaaattagctgggtgtggtggtgggcacctgtaatcccagctactcaggaggctgaggcaggagaatcgcttgaacccaggaggcggaggttgcagtgagccaagatcgcaccactgcactccagcctcgtgacagagcaagactctgtctcaaaaaaaaaaaggaatctcaacatcttgtgcaaagtttacaaacacttaaccatgtgaacacactggcagggcccctctggagcacgtgagggtcctagaagcttaagctctgttagcttcacagtaaatccagatgtatacatgcctacctgataggactgtgagggattaaatgagctcatatttgagctcctagaacagtgtctggcacagaataagcccctcgtaagtattggctttcattcttattgccctcagggttcctgtgagcattagacatttgcagattgcccaagtaacatcaaacgtggtgtgggcagatgctgtgcacctgacacatgcattcattagctcatctaatatgtagcgttcacgatgggccaggggctgttctgagcactggggaaccaatggcccctcttaaagctttcggtctgggaggggtaattgggcagttactcacacacataggcaggtccaaatggaatgaggacaggtgctatgagaaaacaaggcaaggccaggcacggtggcccatgcctacaatcccagcactttgggaggaggatcacttgagcccaggagtttgagactagcctgtgcaacataatgagatcttgtctccacaaaaataaattttaaaaaaaatgagctaggcatggtggtgtgtgcctgtagtcccagctactcaggaggctgaggcaggaggatcacttgagctgaggaggttgaagctgcagtgaaccatgatcatgccatgccattgtactccagcctgggtgacaaagtgagaccctctctcaaaaaaaaaaaaaaaaaaagcgagactatatctaggagaaagaaaagattttgatttggggcataaggaaaggcctctttgagacattacgaaagagtagggaagaattcttattctcatttctggtttgcttgcagtttctgcatgtctatccgtaaggcaatctggcatggtgacattaattaaagcaactaaaccgtttggcggtccaactaaaatctaagcaaatattgtctcctctgagcctctcaacaactctgagatgagtaagcggagacccaggcaagagtggctttacctgagctgacataaatactaaatgaaggagctggaattgaaatctccacctgactgcctcacaggtccttccttcacaccatgtgcctgacacagagcaggggtgcccctgcagactcatgtgacctcatgaccttctcagaggccacacagtctaatctcctcccctctcactgtgggaacagaggaagccgagggcctgagagtcgctgcttctgagacccatcccacatcctctgcctgccactatcaaagtggttgtgacctccctggggtagcagagtccaagaacagtcagtctcccagacacaggaagccctcctgtggtcctcaggcacctgcaccatgggtatgcagatctggccctcattgatgcaaacaccagccctctcctggctttctgctctaccccctggcacatttcttcctggaagggtgattgatgctctgctacttgtggccttggaggtgctcacagtgagagacatgagatgccttaaaaccatgaaggtcagagttcaaaaggcaagtaggcaagcagggagagcccaagtattgggcccacagaactacagtagggaagcaggcttatatctgagcatccccacaggcctggcagaagcaggaatggatgatacatggctctcatgatccaatggagggaagcaggtgcttaacacatgggctgggtgtggcaccatggggatgagtgctgcctaagcacctaccatgtgccacccactctgctaggtgcatgaagccagttactgagtgggcctcttaactgtcctgtgtggtaggtacgtttatccctatttcacagatgtgagcactgaggctcagagaggcaagtgaacattgtctcctctgtaatgaccgtcccctataaactcctggcaggagggccttgccagctgagtcatggcactcatcataaaggcttcaaggaggaggggagtcattatagaggagacaatgggccacatagtagatgcagttttctgtagaagttttattttaaaaatcaatgttattgtttttaaatacagaaacttttgatatttccattagccctggttaaaagctgaaggaaatgttttaaaatcatatgtcataaaagtatgtctgggaaatggaaggttttttttttttttgagatagggtttcactgccacccaggctggagtgcaggggtgcgatcatggctcactgcagccttggcctcctgacctcaaacgatccttccaccccaacctcctgtgtacctgggaccacaggcacacaccaccatgcccagctaattttttttttttttttgtagagataagatcttactgtgttgtcaaggctggtctcaaactcatggcctcaggtgatcctcctgcctcagccttctaaagtgctgggattacagacgtgagccactgcgcccagctggaaatgggagttttttaagtgtccaggattataatatttggtcacatatcagtgccggagcactcatagaaatgcacacatactgaggtcacaggaactaactgctttagacatgttaccccagccaagcccccaacaacctcgtgagagagatactattcctatccccatttcacagataacaggctcagctgtcaagcaggtcacccagctgggaagtggcggagcccagctgcaaagtcagggctgctgaaggggagagaggtggccgtgtgcccagctgtgagcaggctagaggtgctgggggacagtctgggtgtgcacagaagcagctcccgagctctcggtgctaatgtgaggatgaaaggcccccaccctgctgctgcccagtgggagagcctgacgctcaagttggcgatgagccttgcaggctgggcctggatgtgtgtctgaaacagggagccttttcaggtggggaggcgccctggctgaagccctcaaatgcagagtcacggggccgggcgcagtggctcacgcctgtaatcccagcactttgggaggcagaggtgggtggatcacaaggtcaagagattgagaccatcccggccaacatagtgaaaccccatctctactaaaaatacaaaaaattagccgggcgtggtggcgagtgcctgtaatcccagctactcggaaggctgaggcaggagaatagcttgaacccgggaggcggaggttgcagtgagctgagatcgtgccattgcactccagcctgggcaaaaagagcaaaagtctgtctcaaaaaaaaaaaaaaatgcagagtcacagaacaggaaaggggctgcccacctgaggtcaggtccccagaccttggctgagcaccgccctgggctcataaagaaccactgtgcagtgccgcgtgatgagtgctccccccatacccagcgcagggaacctggggagagagtggctggttctgccctgggggtcggggccagccgcagggagctggcagccaagctgggccttacgcgctgagtcatggctctcatcataaaggcttcattcagagacacggccacaggcggccccagcgctcaccatccctggtcctcacaaccggcccaggatgaatcccagccgcacaccagggatacacctgcgcacaggaagacatggtcccttctctcaaagaattgcggtctgaggggagaagcaagaccatgaacacggaaataagtcagtagcgcccatgctgatagagaaagtgcatcaagaaggcgaagcagaagggaagacagggatggccatggtgggggtttttctctaggaagagggcctcatgcaggaggtgacgtgagccgagccagacagaagtgagggatggaggccaggcatggtggttcatgcccgtaatcccagtactttgggaggctgaggagggtggatctcttgaggtcaggagttcgagaccagcctggccaacatggtgaaaccccatctctactaaaaatacgaaaattagctgggcgtggtggcaggcacctgtagacccagctactcaggaggctgaggcaggagaatcgcttgaacctgggaggtggaggttgcagtgagccgagattatgccactacactccagcctgagcaacagagcaagactcgtctcaaaaaaacaaaaaagaaaaaagaagtgagggatggaggcacgtgaggtgggggagtgggaaagagcttggctgtttggtggctgagtgatgggaaggtggaatggaatggaaggaggacccgggcagaggttctgagagcacaagcaaggagtctgcacaagaggccaggcaagggcttttagctgggaaatgacaagacctgcctgatgttttaaaaatatccctggccagtcacagtggctcacgcttataatcccagcactttgggaggctgaggcaggtggattgcttgaggccaggagttcaagaccagcctggacaacaaagcaagacccagtctctaccaaaaaaaaaaaaaaaattagctgggcatggtggcatgttcctgtagtcctagctactcggaggctgagatgggaggatcactggagcccaggtgttagaggctgcatgagctgagatcacgccactgcgcttcagcctgggcgacagagtgagactctgtctcaaaaaagagcccctgcagcacctggaggaagacagcactggaatcgggaagagttaggtggttgcatttgtccagggaaaagaaggtgagaaggaggtggtcagctcggccaggctgccaggactgctgatgtaggtggaggaaagagccatccagggctattccatggtcctcacctgagctcctgcatggaggttggtgcgatttgctcagcgggcatggagggaaacttgacatttgggtggtaagcatgttaatttgagctgcccactggatagtcagttgaagtcgtctgcacactgtggtatgcatccacatccccttgaggtccaaggccacctgccagaagtgttggctgctgcagaccgtccccaggagccaaaggggctgccttgcccaagatgacagacccatcctggggcagccctcatctgaaggctggtccaggtggggacacaatgattttgcccccttgcctctttctgggcaactttgaaggactatcttggctccagatgccccggggatcagctgaggctcattgcagctgcaatgcaatccacttctccctctgcccatcctgcatcccttgtgccctcacaggccaagccctaagacattccccagtcaacttcctcacaggcaattggatgcatttagttcggagctccaggaagaggtctaggctgggtggcaacaatgtggggtggggacatcagcactggtggaatttaaagtctcaggctaggtgagaagggaagaggattgaagcacagagcatgccaaccttgagagctgaggaggttggaggggtggtgccctggaaccaagctaagaaaggtttaaagggaccaggtgcggtggctcacacctgtaatcccagcactttgggaggccgaggagggtggatcacttaaggtcaggagtttgagaccagcctggccaatatgatgaaacccatctctactgaaaatacacaagttagccaggtgtggtggtgcatgcctgtagttccagctactcggggctgaggcaggagattcacttgaacctgggagacagaggcttcagtaagctgagattgcgccactgcactccagcctgggggacagagctagactccatctcaaaaaaaaaaaaaaaagagagaaagtgtttaaaggagagatccggtgcctgtaatcccatctacttgggaggctaaggcaggagaatagcttgaacccgggaggtggaggttgcagtgagccaagattgcaccactgcactctagcctgggcacgacagagcgaaacactgtctcaaaaaacaaaacaaaacaaaacaaaacaaaacaaaaaacaaaaaaaaaacagagattcacctcaccaggtgctatgaggattgttaaggtaagatgaggacccgtgacactctagttagttcatttcaaccgctgtggtgttcagggaggaacttgaaggaacgtttaaagccaggggcataatgtggtgaggagaggaactcatagagaaggagaaatggatgattcagaaggggagggcaggagcaaaaccttgaaggggatggggtccagggcccacatggaagggtccatctgtgaataatgctttgtatcaagaagaaggcagagtagaggcacctgtgcaggttggtgtgtagagctggtggggaggtcactgggcatggtcactggctgtgagtgagtggtgggaagcagtgctggagatgagaagacaagaagagaggagagtcagcttaacctgcaagtctcccagctgcaaagggcactggtgcgcttcaaacctgactctgggcttcattcactggaaaaagcacaaagaaagacattctaagctgtcaagacgtggtaggttcagcaaataatactagttacagtaaaaagatgtgagctgttgctacgcttaagcattcgtcgtgcattctttcatttaacaagccatccctcaaaacccctgtgacacagatacagttggtccttattacttgcacattctgtatttgcaaatttgcctgcttgctgaaattcatttgtaacaccaaaatcaatactcgcagagcctttgtgatcatttgcaaacattctcacggtggtgaagatgtgagttgcccaacgtgcatgttcccagctgaggtcaaacaaggcgacaagcggccttcttgtttcagctctcatactgtaaacaagtgtcctcttcacggtctagttagtgccacgttttctgcatttttgtgtggtttttttttttttttggcgattttgctatttgaaatggcccccaaaggctgtctagtgttcctaaatgcaagaaggctgggacgtgccttgtggagaaaataacgactgagtgttagataagctttgcccaggcatgagctacagtgagttcaatgttaatgaatcaacaatatgtattaaatatagtgtctttaaacagagacatgcttaaaacaaggttatgcattgatcgtttgatgaaaatgttgtgatcagaggctcacaggaattgaaccagtatttcccctaggggcaatggttcagtattcacgattctgtgtttgtagtgacttcatagagcataactactgcaaataatgagaatcgactgaacttttttttttttttttttttttttttttttgatacggtgtcctcctctgtcacccaggctggagtgcagtggtgcaatcttggctcactgcaatgtctgcctcctgggttcaagtgattctcctgcctcagcctcccaagtagctgggattacaggcacgtgccatcacgcccagctaatgtttgtatttttagtagagacgggatttcaccatgttggccaggctggtctcaaactcctaacctcaagggatccacccacctcgggctcccaaagtgctgggattataggtgtgagccaccgtgcctggcctcgtgtgtactattaactctgttggtcacataagaaaccaaggctaagagactagacgagctacaggtagtaatagcagagctggggctgaaacctgggctggtggggcactagggggcttcaccccatgaatgtggccttgtgatccagtggggaccacaggggacctggcctggaagaaaggtttcttttttagggcaccccatgagcagcctgcctccccactgcactggcctctccagtttctacgtgaacacagaagctccttcagccctcctgggctgcagccacagagctgttgctgggccgtggttttcccctaagtgggtggaacagtggctccgtgtccagaggccgggcacctttggttttcctttgcccagcccagccctggcaggggaggcacaaaggaggcatctgtgactgagcacggaggccagccagtctcccgacaccagcccatccggtctgctgtggcctcctgtttattcaggggataaacttgggcaggccccagggagccgccctctccccagccccaccaccttctccacagggcagagtctgcagcccttcttctgtcttttgtggggtagcttgcgtgttgtggtttgggatacttcttcatcccagcatcactgagataatttaggagacaattgcgggggactctgctttcagagtggagttacaagcccttcagtgtgtgtccttccaaccccagaacagactcagagtcgtcatcgtccactgtcatcccgcctctcaggaggccgctaaatctgagactaatggctgccacctggagtgttcctcaggcagggagcaaccacacgactgtgaggagggggcacttacctggtggggggctcagtgctcccctgtggggctgaggaaggagcctgggcttggggagaagctgggtgctccccgcccaccctccttgacccatcagatatagatgagaagccacggctgggagggtgcgaagctgacagcagagccccaggtccccagacaagctgtggggagaagagcagcgcgggcgtcagaggcgcctggacaggcagccggcaggtccacagcaaggctgcaccttgttcttccttggtctctgggtggccagcactaggtctggcctgcggtttctgctcagtgattcttgtttgagtaaatgaatgacggggtgaatgaatgaatggtcttggttctatgatggttactttggggaagttattttattatacaaaaccgagcctctcttttttacataggataacggctaggtgcacagtctctggagccaggctgcctgggtttgactcctggctctcaacttactagctgtatgtccttgagtaacctctctgagcctcagtttccccatctgtaaaatggggataatacctgcctcgtagggttgtcgggaggattaaatgagctcatatcatgtgaagcactagaacggagcttgtatatattaagtgctatgtggccatttgctgttaatacttttttttttttttttttgagacagagtctctgtcacccaggctggagtgcagtggctagatctcggctcactgcaacctccacctcctgggttcaagcgattcccctgcctcagcttcctgagtagctgggattataggcgaccaccaccacacctggctaatttttgtatttttagtagagacggggtttcactatgttggccaggctggtctcgaactcttgacctcaaatgattcacccgccttggtctcccaaagtgctgggattacaggcatgagccaccgtgcctggccagctgtaaatacctttaagatgaacataacgtctgccttccgcgcgtgttgggagcctggtgcattgtttgcccaggtgtgctcttctcagaacactgatcccttgtgttgttaaatgttaaataagaagggtcctgtccaagcccagttgccttaaggaagcctggggttaaaagctagggaggcttctctcctgcagaggtgcctgtgacatcttcaagagggagtgaagaatttcaccggctgatttgaccacagatcaatttcttgctatcagagtgggatggggtttccacaaaacacgtctttgaagacaacaaatactgcttccttccctccctccctggagccctggcctcatactgcttagcttatctggtagcagccagggaaatggcaggatgcatctccctgggcttagaactggggcaggaggcagcagccaagtcaacagcaggtagtggccagtcctcagctctaagccagcaggtaggactgcagaggtgcatgtggcaaatcatagacacctgatgtgggctgccactgactgagacactgctgagctggacagcagacacctgcaacccaaggatgatgaagaggaacttgaggcctttaattgctcatggtcttcaatcatccttaccaattagtttctgctgcttcccaggcaattccggttgctgtaagtaagccagtgatgcaacaagagaggcagaagggagtcctgaacgtgggccagatctgggtacaaatcttgtctctgccaccacttaatcctcttgagcctcagtttccttatttgtttcatgagtgcagtaacatctactctacaagattgttggattaaattaagaaatgaagtggctggcacatagtacatagctgttatcaacaataggctgcagggaaatgttctctccttggtttcagggcccttgtccaaggttcccattaggtagaggaattgtttcttcagagttgagatctgatgtgtctgggaagagggcagcctgacttgagaaggtctctcacctttcaaatgcccatctcaggaacttcagaaaaggcttccgctaattcaaaaatcaagtcctcagctttccattgtctgtgggtgagggattctcagtcccattcagggccctaaccattccccaggtgattactgtgtgccagacatgttaggagcttaagtccaaagacaccaggggcatggaccctgtcctcaggaattgcagaatggtaggggacctgacaggaggccaatcctgacaattcagtgtgttcctcttagtaacacagcttgtgattgaggcatagacatcatgaagccaaggaataatttattatcactggagaagacagggaaggcatcacctgggaaatcatacctgggtggagttttgaaggatgaataggagtttgcctggtggacagaggaggccaaaagtttggtactaaaaacagcatacctactctactcccaaccacctcccttttctaggattggtgtgggtccatctgccgttagcaagctttgtgactataggtaagtcatttcttctctctcggcctgtttcccattggtgaaatgggatcccttccagctttaatgcattgtgatttcatgtttatataggcctagataattgttttaaagtcctcatatttgcaaaacacggggcaaaagtctttgactttttctcttctaacgcatctcccagtcttacaaagttggttgtactctctccatttgactgaggaggaaactgaggctcggtgaagttacttgcctttagccaatatgtggcagatccaggcctcaaatccaggtcttctggccctgagttccactgtttctccactgctccacacggcctctcaccccacaagccctcggcggctgcacataaatgatccttgacagattactgcctcactcaggcccctgtcagatgttactgctgacagttggggaggaggaggagcgagaacattgtgtgccaggatgccaggcctcggccctgaaggaggagcttatgagaaagaggcaagcagggaggcagcaggtaggacattgagcatggtcaagaaaggctgttttggccagagagtggataaatgataaagtctggagtagcaggcaagtgcacagccaccctttcctgaagcaaaaattggtgcctaaatccatagtgaaaatagtccccctggccgggtgcggtggctcacgcctgtaatcccaccactttgaggccgaggtgggtggatcgctttaggtcaggagatcgagaccaccctggccaacatggtgaaaccctctctctactaaaaataaaaaaattagctgggtgtggtggcacgtgcctgtgatcccagctactcgggaggctgaggcacgagtatcgcttgaacccaggaggcagaggttgcagtgagccgagatcacgccactgcactccagcctggcgacagagccagactccagactccgtctcaaaaaaaaaaaaaaaaaaaaaaagaaagaaaatagtctccctgcctccagggtctctctatgcccataccctgctttgtttttcttcagagcacatattatatatgtcactcattaatttattgtttcatcatctgacttctcccactaaaatgtcagctccacaagaatcaaccaagacttggtactgatcaaggctgtgtctacaacacctagaacagagcctggcactaactgttttgaacaaatgaaggaattaatgaaggaatgactgaaagaatgaaggaatgaatgaaagaatgaaggaatgaattaaagaatgaatgaaggaatcaaagaacaaacgatcccttcacctgtgatcatgtcagcacccactgttgtcagcaagcctttagcaaagcagttcccaaactgctgcatcagaatcactgggatctttaaaaactgccaacacctggcttccaccgtgacattcggattaggttgccatggggtatgttattgacatttttttaggttcaagtgattccaagcgttttttaagttcttcaagtgatcctgatgtgcggtgcagtttaggaaccactgctttaaagggttgtccactcctgaaaaagggcagtccactcctacaaagcttctagctgagttaatagccaatcagagacatgggtagtggcacgcagggtgggacctctgtgctgcccaagtctgggaggaggtggggagggtgaggtgtttggggaaaggagagttgtttttgctgcctgggttttgctgtctgggtaactctgatgttaccaagagtagaggaaaacgaagtttttctccttgctctcacccaattcaagtcaaaagaacaccttgctggacttcctcctcccctgccacctcctcttcttggatgactgaatgagtcagggggcttgtttgttagggaggaaacactggttttctcaccattttccccctttcgttgagcttgaatgagtaagaaaacccattgtttatacatgcacaggttgacacaaatagagcttggagcttctgaagactcaacctgggctccagagtcaataagaccaggtcccaccccgtctgcacagcatccagccagatgttacaagagaacccagccccgggggcaggctggtgaaatcatcccggccagtggacagtcaccaacaccggagtgtttgccaagggaaacaccttgtttccacagtccaagatcctctcctgggctggcacagagttgcagaattggaagagacctaaagatgtgctgtccagctaaaagctcttccaggggaggagtctgaggcccaaaaagttagggagagcccagaacccaggcctcctgcatcttcactgggtttggtgggaagaggcagaggaaggagtggtcagagaagatgccagcttagtgcagacccctagacacatccccactggcgagagagggcttttggatccaagagtcattcccattttttttctaaataaaaaattgggggccaggtgcggtggctcacgcctgtaatcccagcactttgggaggccgaggcaggcagatcacttgaggccagttcaagactagcctggccaacatagcaaaaccccatctctactaaaaatacaaaaagttagctaagtgtggtggcatatgcctgtaatctcagttactcaggaggcggaggcacaagaatcacctgaacccaggagacagaggttgcagtgagcaaagatcgcaccactgcactccagcttgggcgacagagggagactctaaaagaaaaaaaaagaaaaaaaaaagaaaagaaaaaaaattaggaatgactttcctttggggtcaagaggcctctgcagtctcagagtcctgcctatttgcttggtagtcccttccctaagccactgcttaagtcatcaaatactgaatttaccacctgggatgaaagctgagatttaagagttgtagctgaacttcctgagcgtggagtcaatggacctctgagagagaggtgagagaggacaagtacttgtggtaaagtcctagccagctgccaggggggcttttccacacatagagccccagctgggcagaaataatgtcctctggccgggggcagtggctcacacccataatcccagcactttgggaggccgaggcgggcggatcacgggatcaggagttcgaggctatcctgaccaacatggtgaaaccccgtctctactaaaaatacaaaaattagccaggcgtggtgtcatgcgcctatagtcccagctactcaggaggctgaggcaggagaatcgcttgaaccctggaggcggagtttgcagtgagccgagatcatgccattgcattccagcccgggtgacagagtgagactgcatctcaaaaaaaaaaaaaaaaaaaaaaaaaaaagtaaagaaagaatgtcctctgtgtgtgcgttgacagaatcaagccctgctaagatggaccaggtttgactgatgctcacagtcctgattaatgactggtgtccaccttggagagcactagactgagagtaatgcaacctggctctactcctggctccaccactaactgagtgtgctacttgtgaggggagatgccatttcccacctctggggctcattcccctgtctgggaaatggttatactataccagtgattttaaatatttttaaagccatagaaccctttattcacatgaagtttcatacagaagacagcatgtacagcagacagaagtggagctatttttgtggttcccctggagcacatcttcccttttgcgaagtctccacagaaccctgagggttccaacaaactcagtttgagaacaacttgccagactttttgttttagctccaatactatttatgtcagctgttgtttgttcacttggctaatattggttggcatcagttgcttggctaatgttaacattaggtaatgttcagaagggttcttttctcaaaataatgatcatgaaaccatatatatatatatttagccagtcgttccacatggccccaaacatgtgcagaatgttgcttctttacaccatccaatgttgagctaactcttgcatggtggcagcgaaagaaaatagacacagagaggccaggcatggtggctcatgcctgtaatcccagcattttgggaagctgaggtggggggattgcttgagcccaggagtttgaggctacagtgagctatgattgtgccacggcacttcagcctaggcaacagagcaagatcttatctttttttttttttttttttgagacagtcttcctctgtcacctaggctggagtgcagtggcacaatcttggctcactgcaacctccacctctcaggttcaagtgattctcctgcctcagcctccagagtgtctgggattacaagcgctcgccactacacccagctaatttttgtatttttagcagagacagggtttcgtcacgttggccaggctggtctcgaattcctgacctcaggtgatctgcccgcctcggcctcccaaagtgctgggattacaggagtgagccactgcgccgggcctgacgttgtctctttaaaaaaaaaaaggaacctcacaggtaatgctaagagaccagggtacctaactcaagaccttccttccccacatcctcataggtggtgctatgctcagaaggcaggattatatttcctattaactcactcttagcccccgtttgaaccaaggacactgaatcctagcctgtgttagagccctcagatcccatattcatcctgtgtctaatctcacccatcagatacagtcaccatccccaccccaccccccactggactatcattgcttctctgaaccctgctggaaagtgttagcccttccctcaaaagtcagggtcctaaattttccctcaggctgcctctaatcctcacctctgttcccctcagcctcttgccataatgatcattagtaatagctactgtttattggttacctgctctgtgccaggctctgttctatgtattttactggtcctgattattttgatcctcacaatagttctaaaatacatactattattatctccaatttaaagatgaggaaattgagacactgggacttaaacttgcctacgttcatttagcaacaaggtggtaaagccaagatatggcccttggccccggcacccatgcacagaaccagtgcgtcagactgcagctcactcatgctgctggtagtgactaggaactgccatttattgagcacctgcagcatcttaggcattgcactagacactttatcatttcattgaaacttcacaactgcaagaggaaatgtcttatttccattttctagaggtagagactgaggctccaaaacattgacttcccttgataagtggaaccgggcaggcttcaaacccaggagtgttcaatgcatctgtggcctttctctgtcactctgcttttaaggacaagtacctgcagacattccccactccactacctttgagaaaaataaagaaggacctactgataccacccgttccatagagctcttgagaaatgtcgctcaggctgcccatggtggggacagggagggggcttgacaggcctgactttctccattgaccttctctgggagagagtcacgaccagagaagggatgatcacccttggtttctgcttttctttcttggttctggacgatcctgtcatgtgacctgctttgagcctaataatccttaggggcaacatcggacttggaagggaagaagggaaaccaagatagaacccctggactcagccacatcctaaaaccttttgggacactgctgagcttaaggtctcagggtggagatgggaaggcagatagagtgggcccagggtgcatgggctcaatcgcataccacacctttgaggagtgcctaaaattaagtgtagtcactgtgctagggtgtacaacatcctgtgaggtaccattcccatcttacagatgaagacattgagtcttagagaagtaacagaacttgtcccaagacatctgggaaataagactcaattcaaacccaagtctgtttgatttcaaagccagtggtatgatacaccacataggtactcttattttttttttaaatagagacagggtcagccaggcgcagtggctcacgcctgtaatcctagcactttgggaggccaaggcgggcagatcatgaggttaggagttcaagaccagcctggccaatatggtgaaaccccgtctctactaaaaatacaaaaattagctgggcgtggtggcacacaccagtagtctcagctacttgggaggctgaggcagaagaatcgcttgaacccaggaggcggaggttgcagtgagccaagctcacgccactgcactccagcctgggcaacagaatgaaatataaatctcaaaataaataaataaataaacaaatagagacagggtcttgctgtcaaccaggctggagtgcagtggtgccatcatggctcactgcagcctcaaactcctgggctcaagtgatcctcttcagcctcccaagtagctgggactacaggtacgtgccaccacacctgcctaatgtttttatttctaattttttggtagggatggggtcttgctgtgttgtccaatctggcctcaaataccttgctgtgttgtccaagctggcctcaaatacctagccacaagtaaccctcctgctttggcctctcataggcactgggattacaggcatgagccgccacatccaaccaacatgtgtgttctatatgatacaccacagtgctcctgtgtgttagagactgtgggagcggacccaaacaagagaaacagtctggcctctgcacatatatctctgaacagcaaggcatactttccgaggagagggctggggcagtggagtttctcttggggccacagctctagctcctctcttaggtggctctggccaggaggccctcctgtacctaatgctgtcccatttggaaagtccccagcagttctgggagctccagcggctgctttgcctcagagacaagccctggtaaacataggggccgctgcgaatttactggcaggagagactgagaaggaagttgacagccaagaggcagagaagtgggcaaagctggtgcgtgtgtgcatgtgtgtgtgtgcatgtgtgggtgtgggtgggtgtgtagggtggtgcaggaccaaagcacccagatgccccactggtcctgcccgtaccaaagtgccgttgccactttgttggccagtgaagactcagggaaggcaaaggtggctttgagccagacaggaagataaatctctcccctcactcaagttatatagtgcaacagcaggtcaaagggcaaccacatttgcaatatttgccgctttacattcatctcatttttgtctttttaaagtccagggcatggttaagagtgatggggggatggggagtacatttttaaacatttaattttttgtagagacgagatgtcgctatgttgcccaggctggtctcaaactcctggcctcaaagatcctccgcctcggccactttgtctgagccactgtgcccggcctgaggacacatgtttgacataaatagtatttactagcattcaacaggaagggtcctctcctttttttttttggttctttagttctcgttgccgcttggttctttgtgttcctgggctggttatggagatggttccgacttcacatgaaaaggctggaaaagttgtgggtaggactctggatgaaagtcagcctaggcgcccccggactcattagggggtggaggcggcggcggaccgtgtggggcggggtgcgcagtgtgagccggggagcgccggccggaatctcacagtgcggtgacaaaaaaccgtgagggtggcgcagaacgggcaagagactacagcgcctacctggcaggggcgcgagctcacacgccgactcctggagtcccagccagggctgccctgagctgggcgcgcccaggcgagctccacctccggaggcggggccggccgcgcggccattggtcggcgccctggagccacctgcccctaccttgggggcggggttacctgggccccgccccgcggctcgggttccggggccgcgtccctgtcctccgcccccgcccccgccccgccccggcgcgaaggccccgcccccgagtcccggggcccaggcgcctcgtgatgtcaccgcagcttgatacaaagagcccttcggcccacgcgggtctcccggcaacgggcgggggcggggccgcgccttccactggtgcccagaagtgcgagcggacaggccggccgcgattgttcctgcgcttcggggctgcccgccgtccccgccgccgccgacccgcgccctctggcttccgcgcctctgccggggagcggcccgcggatgcgcaccccgccagctctcgggagccaggtaagcggcggccccggggctggcgctcgcagggctccggcggcgcgcacctggctcggcccggcccgcggccccgggaagttggcggagagcggacttggcctgggaggtcgtgttacctgagccatctcgttcggccgcgagtagaagccgctgccaggtgcgcgggtggcggctccttccccagcgcagttccaggaagtgcttttagtggactaggaagggggctcgtctgctggggcgcctccctggggacccgacggcgggccccacctccggccgcagcgcccctgccctcctgcccttgcgggatcggcgtggtacccagcgccgtacccttgggccgggtccccgagggggctgagcgccgcgaagtttttctgtagctcttggcggctgcacagagcctgtttcctggcttcccccgtccctctgggatggtggaggtggggagtcctcggggccagcccaggtcgtggtgtggggccggggccctgcctctccccagccgagaagctgcagtggtgggaggtgtgttgtggcccttgaggcggccggtctggcccggtggtgggagctgttggcacagccgcttctctgtgcgggcgacaagtgtctccaaggtcctggcggcgcagtctctggagagcgtgtctgtgctgtggggaactgggttccgacacagccccgcaccctactcctcgcccgtgcaaactctccagtgccttctctttcccttttccctcaccctgctctcccacagagggctggaaatgacacctcactcgccccgagggccatgccagttttccttgactgaccgattttctcaaagcaatgtgagaggtctgggtcctgtctctgcacttagcctccaccaggtcttggagtggcagcaccctgggctggttcctggtgatccaccaaacttctgccctgccctgccagagcaggaggcaggtggcattggcttgggcttctgggacgctgaaaagcaatggggcaggcacattccttagaacatccccaggtcctggcccagctgaaaggtggttacagtggttgctgggatgggaaaaaggagactcaaaggggtcggaggcagtactaattgtgtgccactagacctctgcaatgggagcgctctcactcccccccatatcctccccccaccaactagccttgcgttggtggagtgcctgagtcgctgcctttgactggggtctcccccaggtgctggcaccctggcactggcccaaaccttaccctgctttctggctttcggggactgttgattatgttcccagggaacattacacacgggacacttccctgccttcaaggtgtttgcaagctcaggcagtctgaatactgggtctgctctgggcctgcccagctcttctaagttgattgcaagttgcctgcagttgtctttgaggtccctgtcacttcacaggggagagtgtcgcctggcggggtgagggaagccgctagggttcttcactgcagaaggcagcaccccttgggcaaatgcgtagtggagaacagcttcggaatttgaagggggggcctggacttaggcgaagggggtggagtaaatgactaaggccagtagaagagataagactgggccggaggcgaggggcgggactagccaggccaggtgagccagctggaaggcatgacctttgccctaagggaggtctgtaggagagactgcctggagcctgccctcggaagggacttttaggcaagtgggggaggaaaagcagaagaaattagagggcccattgggttctaagccacctcctttggggttccaggggcagcctgcactcggaaggctctgggctgcagcttgagatactccaccggccctcactctccctcccgaccatctgtgccacttctaaagcatgctagtgccttcctagccccttcccctcctggtaggcaggctgcttcagacccaaggttttctctttggccgttcacctggggcccttgcaactccctccttcatctgtacccgtaggtatctggcagtccccgatctgggcagcccgttatgctgaggtttttcacaactgattctgttctgaggagacttcgcaatttcactttatatgttttaggtatgggtaaggagggggtgaagggggtaggagaggctcccaatgaaatagcaggtgagcagttcccagaaggcaggcatctccgaatgagaaagggcatgctgtttcctggcacagggctcattgtgtttgaaaaggaagcatcttttttttttttaattgagttgagacagggtcttgctctatggcccaagctggagtcaagtggtgtgatcagggctcactgcagcctcccaccctcccaggctcaagcaatcttcccacctcagtctcagctgggactacaggtgtgtgccaccctgcatctggctaatttttgtttttgtttttgtagagatggggttttgccatgttgtccaggctggtcttaaactcctgggctcaagggttctgcctgcctcaccttcccaaagcgctgggactacaggcatgagccaccacacccagctgaagcatctttatctgttcgtgcctgctgtctggtgttagcagtggggcacagtgccctggccttgccaggcatacagaacccctggggctggactctgtcttcctctgggtcagctctgctggctcttgactcaggaactgggcacctatggcttcaaacactggcctcgaagatcaatgcccagttacttcatctcaggtctcatggctggattattgggtggtcccatccataccaattaggcaccacaagacaggcctgcctatttggcagtcccacctggtgccttactggatgtcgtacgatctttgcccctgaatggtaccacagtctccctcaccaggaggcgtttcaggacacggaggcttccccatttctgtttgctcagcccccagcacatttcccagtacagggcaagtggtactgaattcattcaccagattcttcgttgcctactttgtgccagattctgtgctgggcactggagatacagcagtgaacaaaacagacgagaacccctgccttcaaggagctcgcaggatggtagtgaggcaggtagagcagtaaaacacggagtatgggagttggcaggaggaagagcagggaaggggagggagtgctgggtttcagagtcagacagggaagtcctcactgagaaggtgacatccaaacgaaagaggttcaggcagagaaaagaggaactgcaagggccctgaggtgggacggtggctggcatgctatgtctgtccacagaactacaagacaggatgtgattggagagcaagccagggctggggggacaggggacaagctcagagagatgggggaccacccaatgctgtgacaacccagaatcccaggaggaggaggagaggggactgacagtacaagtgagactagaaatccacaggcacgagctgccttccattgctctgcccttctcagagcctccgcgtcgaggggatttgggcattgaggcatttctggaggacaggcttctgtggccactgctgccacagacttccctgccctcagcttgagttgggtcagacgagcctgtccatgtgaacgtggaaacatttcctgccagactatgctgttgccaccacacgaatcaaaccagcaaagggcacgccggcgatgtgcatacagctgtgtctctgacagctgcctgggcctgcctgctgttcccacgggtcagctcctgtcgggtagggacaggtcctgctctcaaggctcataaagcagccagcagcctgcccgtgttttccgcattctggcctgtgtcacccaggctgtctcctcatctcttgtctgatcctcaagggttccctggcctccctcttcactccctctgcctgtggcaggcagcagcacagttctatggggtcctaaggaccccagggagtcactcccacatttgagcagcaactttgggtttagtctgtccaggttagggccccagatcatatatgtgtgtgtacacacacgtgtgtttgcgtgtcatgcggcattcggatggggcatcctgttcatccacccccctgctatggggtggctgaaggttggggtgccctctgagtttttggtgggtggggcttcagcagggtgtcttggctacctctcctggccagcacatgttctcctgggaggatttgtagctttgggcctgaccacggttccaagcaccatgatctggagcccacactgggtggcaggctgcagagaaggtgcccccagaagcctggactgcacccttatctgttttcatttggagctattttctcattatctcatgccaagtgtctgactacacatggcagtccttccccaagtgtttgcagcttcatcataatactgttaattgaatggaatttgtcattggccagcttctgtggaccccattcaaggctgagtggatgctgggggcgcccagctggccttgctcagaggggtcccgagcgtcttggtgcttcaggagctgagcccccctcaagagcattgatgacaagagctcagattctcagaacccccctgagcacccagacaaccttggtggttacttcttcactttttcgcatgacctggaaaggagatgagacggggaggagaacataggcaaccagaaggacgtgcagcctacaagggtcgtatgaaggtcagaggggtggctgtgatggcccagagctgtggggtctgagtgacctccagcccagaaccgcccagcaggccagtgctagtcatgccagcacttccaaacccacttcttgactgaccttaagaaatgggaagttttccaactgttggtcacatttttaattgatctaacctgcttcatcttcccagacaagtgggttctttcccaacaatgtaaacattaattcagatgaaaacaaagctctgtagaagttattaatatctgtggctctgctcatgggagcctttctcttttgaggtaccagaaagaggaaggcctaaacagaactggagtgtgggagagtgggcgggctctctctctttagtcatctgtggtcaccccccacccccctgcgctgtgcaagcctgataccatggaaagggaacccacatttcaaatagctgctgctgctccggtgaacttggggtaagggagctgaggggtgtctaccctctgcaccagactcaagtctccctcctagaataggagcgagaatagcagcaagtccctgccccctgctccctcgttttcctggaagaaatgcctacctaagacacagacacctgcatcccacgctttgtcacccaatgcctgtttccttaaggagaaaaaatgggcgccagaaaacttctaggtctagatcctggctctgttgctcgctagttgtggaactttggacaggcgacctcacccttctgatttcactttccctggcctcactcttcactccctctgcctgtgggcaggcagcagcatggttctgtggggtcctaaggaccccagggagtcactcccacatttgggcagcagctttgggtttagtctgtccagtttagggccccagatcgtatatgtgtgtgtgcacacacgtgtgtgtttgcgtgtcaggcagcattcagatggggcatcctgttcatccacccccctgctttggggtggctgagggttggggtgcccaacaggtagaatggggttgataatagcacctgcctcgcagggtgatggtgaaaataaaatgagccatggtgatttaagatgcccagtctaggttctggcctttacttagttgacactcgtggacggttagatggttagagaggcaggccagtttagtaccaaaatgccttcagagtcaggctgtctctgggttcagatcctggctctgccccttgctattggtggaatcttagacaagttatttaatttctctgtgcctcagcttccccacctgtaaaacgaggatgaggctagtacctccctcacagggttcgtggtaagaggatgaggctagtacctccctcacagggttcgtggtaaggctcaaatatgtaaatgtatgaaaagcacttaaaactgtgctttggggtgagctgttattcttagttcctgcaggcttcagctggtttgattgttgtgactaataaccttcgcacctaacagaatgtcttgccggggagtgtcatggcccaaacaggaaggtggcagcggaaaaactccattactcaagggcctttgcaagagaagcaaaactctacttcctcagcttctgtgggtttttaaatcttttttttcaattttaattttaatttttttaaaaaaaaagtagaaatgaggtgttactatgttacccaggctgatctcgaattcctgccctcaggtgatcctcccaccgcggccccccaaagtgctgggattacaggcatgagcctctgcacccagccagcttctgtgtttttaacaaaccttgctcgggctctgcagatacagattctgggtctggggtgaagtgactagcatttgtgtggcagtctgtgaatgagatgtcaagcagcttccgaggtaacagacttctccccaggttcagtgagggagactgtacctagcctgtccttccagaggctgctcacactgccaggctgtggctggcctgccaaggggaggatggccctccacacctcggcccacctgcccttcacctccagccagggcctgcctgtccatccacctgtgcctagctggaaaagctggcttggagcagtgctgcccatctgccactgccagcccccagcatctgccttattaaaatgctgaggctctggctggccacaagccccaggagatttggagaaaagccagacaaaaaggtgcaggctgtgccaccgcccagccacactgggtgactgcccttggtagttaaccacagagtcatccagcttggctgcccagaggtctatagctccactcaggcgaagctggctagcctggcctagcctggctggttaggtgggcaggacagcctccacttgactgatttttttttttttttttttttttttgagacagggtttcgcatttctgcccaggctagagtgcagcgatacaatcttggctcactgtagcctcgacctcctgggctcaagtgatcctcccacctcagctgcctgagtagctgggtgcaccaccactcccggctatttattcatttggtagagatgaggtctcactatgtcacccatgctggtctcaaacttctaggcgcaagcaatccttccaccttggcctcccaaagtgctggaattacaggcatgagccaccatgcttgactcgtctgactgatgttaggcaaccttgaattgatggtctcctggtgaaatgagggttcttgttgacaaggcaggtctggccaacacatttttgtatgattatctgcacgattgcatcagttattagcaaagaaggattttatagcagcaggtgtgtgctcatgtgcttgtgtggagttgttgactgcccttcactgcacacacacagtctgcggaactgtgactgaatccctgttccctactcacacttacatggtattttctgggattctaaggcacattctttttttcctttcctttttttccatttaacatcttaaattggaatgtgtcgcacatttgcggattattataatttgacagcgcctttttcttggcatacttgaaataacggtgcattgtaaaatcagaggtgtctcagatttaatgaaatagaaactaggtaacctctggggaacttatataatttgtccagttcctccaaggatgcaggtggagccaccttgtagtggtggcagattatatgaggggaccctgatgtggttcaaggggacaaccttggattgggcttagattccagctttatggctcgccagctgtgtggccttggcaaagtagagcgacctctctgagcctcgggattttcctcccaccacatatgaatcgtggctccacagttgtcatggctgtgtgcaaggcaacattccctgtttctcttgctgggtatcatctaaggtctgccccgttccatctgggttaagagggaaaatgagggctgggagtgggtcactggccttcccaagggagcagagggaaactggtgttccaagggcttcttgactcagtttataatccttggacattactcttcttccctcgtccttctccccctttgcctgagttttcattttcacatgtgtttccttttagcaattttctttcaaatctctcctctccctttctgtaaagtcttcccacatgtagcctctttgaagctccctggggtgggaaaggggaggagggctctgcctgatggcctggatggcacagacctcagaagcccagtgtgctgtggtccctgcaagcttcagctcaagtccaagttctggtaccatcagcgttgctaactgccattcctgtggctgcagggtcagcctgagtccactccagtgcacagtgttgtccatggggtgctggatgtcgcatcgctgagagcatttggtattctctgtaccctccttgctgcgttaaaatcagacctggttcaaatcccagccctgcgacctttcacgaattacttaacctccttgaacctgtgtattctcatctaaatagtggctgatgcacagaaatacctggcacacaataggtgcttagcagatgcgtgctttccttgttctcaaatgtttaagacccctttgtggacaggcacgatggttcatgcctgtaatcccagcactttgggaggccaacgcgggcggatcacctgaggtcaagagttcgagaccagcctgaccaacatggtgaaaccccatctctactgaaaatacaaaaatcagcccggcgtggtggcaggcgcctgtaatcccagctacctaggaggctgaggcaggagaatcgctggaacccggaaggcagagcctgcagtgagccgagatcatgccactgcactccagcctgggcgacagagcgatactccatctcaaaaacaaaacaaaaaaaaaactgctttgtgcttgtttaggtgttaaggatctcggggagtgccagccagtggcactgctcctgagacagacggaggagttctgggcagggggcagtggcaaaggcacaggggcctgtgtgagcaggatgtgtcaggggccccgtccttcaggatggctgggctgcagtggggtgaggcaggacggagagagaggaggaagagtggtggggtgggcacccagtcggcacctacaggggtgcacatgacaaggctgcacagggtctggctggagcagtacagagggttaggtgtgggctgttcatggaagtcggggctgagttggggaggcaccaggagacagccacatggggatgtctgggtgacagtggcccccaagcaggggctgagtgtgcgctgctggctagagggaggctttaagagcaggtgatggttttaaaccttgttttccttggagatcttctctctgccccctccctcttgagattccaatgaaagccagtagcccaacctcctcagttttgtgtgtagtgtcagagattcgaagccccctctttgatgaggtggtgcttatgccccctgtgcataagaagcagcatgtgctgaggcattggggtgggtaaaggtgcccaggagcctggggtactagggaaggggagaggcagagcatgtcctgaggctgagacctgctggaaggggctttgcgagctgctctcaggagctgggcctggttctgtgggcagtggggagctcacaagctcttagagggggttcccaatggactccctgggagggagagtctccaccccatgagcccctaatgccctctcacctgtccccactgcgagaaagcctgccctggccggaggccctaagctgagctctggccagctatgcttgagtgacaccccccaaccccccatgcaagacagcagcttctggaacacgaagcttgggtagctgggtctagcaaaggccacaggacaaagagagacacctgaactgagcttgctgggaagaccatgggggctatgtgctgatgggaggtaccagaagatggggcagggaggaggagagggttataaaaaccaagggctctggcaggaggccctgcagggttgggaggaggagagtcaccctgctgaccctgacctgcctgctccagaagggcgggtcacgtggagccttggccattggctgtgggtaaacatcggtgctctgctggctgttcaaggcctgagggttctgtggcagaggaggagctgggtgggaacccaccctggctttggaccgtgggtcagctccatccaggcatgctctccttgagttggatagtggcctctctctggaaagttccatgtcacctctttggagggtgctcccctgaaaatgtagcctgacctacccggtggactctacgagaagaaagagctggcctgagccactgttttccctcccaaaccttcactttgagtgaagtgtttttatcatcgctcctcttatcatgatggtaaagtatggagcccccaaagcaagccccacagactcttggttgtgtgagtaattaagccctctcttcaaaaagccacatcttgaaaagctataatttgtagcaaaaaatagctgcccgttccaagaaccaggagagccctttatacgcaccccattcaactgcagcacgttacttcgcttttgagttgagttgctgggacctctggtccatgcttttcttgggggaaccagagatgcagtggctgcatgggaactggagcttccggtaggcatttgggaaatcttttctgagaatttagatgggacgatttaaattagggaactcctgatttgggtttgcatggccccaactttttgtgtgactccaaaggggagtaaagagaaaaactgcaggatacttcaggggaaagtggatgagactctctggacaccattcccccactttttcttttccttcttcctttctttcttctttttttttagatagagtttcactctgtcgccaggctggagtacagtggcacagtctcagctcactgcaacctcctactccctggttcaagcgattctcctgcctccgcctcccgagtagctgggattacaggcacgtgccaccgtgtccagctaatttttgtattttttagtagagatggggtttcaccatgttgaccaggatggtctcaatctcctgacctcgtgatccgcccgtctcggcctcccaaagtgctgggattacaggcatgagccaccgcacctggccacatttccccatctataaggaggaaaatgataattacttgcagggagtttaccacctctgtaaagcacagagcagactggccacatggtaggcgccctagtatgtcaactttgttctctttctctgagttgtggctccactagctatttgtagacaggagatctttgtggcttcaggtaggtgatgggggactgaaagctaagaggaaaagcctcccctgacctgcagcttctctttgagctggcatgcctggaattcttggggctggctgctgggtttgttttccagatgtggaagcaatttaagttctgttttcttaatccccaacagtttgcctccgaagtccacattctcatttgaaaatcaaggccgttggctctgtttgcagggcagagggtaggctagatagcctcttcaaaccctttttgtttaggaaatgggcttactggggcactcagatctgggacccagggcattcttgggacagtcacaccccatccaggacttggttaaaaggtgagttcactttctctgtgggttttccttggagatgattcactgagctaaattcagctgcaccttggttacaaaccagctctagaccgctgtggagtggcgggggtggggctcgggtttgggccatgtcacaggccagctggcgtccctctgagcagggtgcccacgtgtcccgggggcagtagcggccctccttcccacactgaccacaacagagggaggaaaatgctccagatgtcaagtagccagaaatactgtctggcacggagaaactggtaatatcttgttcagttactgagcgctgctggtcacagaggcagcctgacccaggataaaaggctccttgtgtgagggcctgtggctccagggctaactgctgatttattctcttgtaaagcaatcgctgtgtaggtaaaataccttttacatttgtcttataactatactaaatacagttttgggcaaacaaaaattgcctttgcaattctaacgtctctgaactgtgcatatgcttctctgaaattgaaatagaatacttatactactgagagaatgcacaagaaaatggaagtggctgggcatggtggctcatgcctgtaatcccagcactttgggaggctgaggcgggcagatcacgaggtcaagagatcgagaccatcctggccaacatggtgaaaccccgtctctactaaaaatacaaaaattagctgggtgtgatggcacgcgcctgtagtcccagctactcaggaggctgaggcaggagagtcgcttgaactcgggaggcagaggttgcaatgagccgagatcgtgccactgcactccagcctggtgacagagtgagactccatctcaaaaaaaaaaaaaagaaaatggaaataacttacttagattggcatatagtgtttatagaatgccatcctgataatcatagattcaccaagctttgatttcaacaaaatatcatctcttaagaagtagcagtatttcaaactaatcgtgaaagagaataagagaatacaacttttttttttttttaggacagaccaaaaataaatccctgagtctcttgagtaggttctggaaatccagttacagatgctccttgatggggttacgtcctgataaacccattgtatattggaagtatcataagttaaaaaaaaaaaaagaaaaaaatgcgtttaatacatctcacctaccaaacaccatagcttagcctaggctaccttaaatgtgcccaaacacttactttagcctacagttgggcaaaatcatctaacacagagcttgttttacaataaagtgttttatgtcccacgcaatttattttttgttgttgttgttttgtttgatttggtttggtttggtttttctttgagatggagtctggctctgttgcccaggatggagtgcagtggcgcgatctcggctcactgcaagctccgccttccgggttcacgccattctcctgcctcagcctcccaagtagctgggactacaggcgcccgccaccacgcccagctaattttttgtatttttagtagagatggggtttcaccatggtctcaatctcctgacctcgtgatccgcccgcctcggcctcccaaagtgctgggtgtaatccaccgcacccagcccatcccacgcaatttattaagtactatgctgaaagtgaaagacaatgctcttatgggtacttgaagtatgacttctactgactgtggatcactttgcaccatcatacagttgaaaaatcaaagtgagcccgggcatagtggctcacggtggcctgtaatcccagcacgttgggaggccaaggtggctggctgcatcacttgaggccaggagtttgagactagcctggacaacatgccaaaaccccatctgtactgaaaatacaaaaattagccaggcgtggtggtgggcacctgtaatcccagctatttgggaggctgaggcaggagaatcacttgaacccaggaggggggtgttgcagtgagctgagatggtgccatcgcactctggcctggttgacagagcgataccttgtctcaaaaaaaaaaaaaattgtaagtcaaaccattgtaagttgaggaccatctgtagttctctttaaaggttgaattggctgggcgaggtggctcacacctgtaatcctagcactttgggaagctgaggtaggtagatcacttgaggtcaggagttcaagaccagcctggccaatatggtgaaaccccatctctactaaaaatacaaaaattagctgggcgtgctggtgggcacctgtaatcccagctacttgggaggctgaggcaggagaattgcttgaacccaagagacagaggttgcagtgagctgagattgtgccactgtactccagcctgggtgacagagcaagactgtatctcaaaaaataaaaaaataaaggttgaattgaattgacctttaaaaagttctcttttgttatcagggtgagaaggtgggcgaaaaatccagactgagcttgggttggggtttccatgaagccttcctaggggaggagaagggatattggtatattggtctattggtctgctacggctgtcatagcaaaggaccacagactgcgtggcgtaaacaaccaaagtgtgttttatcacaattctggaggctgaagtctagcatcaaggtgtcagcaggcttggtttcttctgagtcctctctccttggcttgcagacagccatcttctccctgtgtcgtcacatggtctttcctttgcgtgtgtcctaatctcctcttataaggacaccagtcacattgcgttagggcccacccattaggacttcaatttaaatgaattacctctttattattattattattattttgttgtttgttttaagacagagtcttgctctgttgcccaggctggagtgcagtggcactatctcggctcactgcaacctccacctcccaggttcaagtgattctcctgcctcagcctcccgagtagctgggactacaggcatgtgccaccacgcctggctaatttttgtatttttagtagagactggatttcaacatgttggccaggctagtctcgaactcctgacctcaagtgatccacccacctcgacctcccaaagtgctgggattgtaggtgtgagcctgcagttcagcccggcctgaattacctctttaaagactatctacaaatacagtcacattctgaagtactagggattaggacttcaatatatgaattttagagggaacaggattcagcccatagcagaaaagggtcttgggaacctccttcaagggaagggggaagaggaagaggagggtgggcaaagcctggcagagtagaggggaggcagttctgctttcaggcaaaggcccatgggtgagggaccccctggggatggctcttgaccacctgctctatttggaaacatttctaggactgttatgactgtgaatggtcttttagaggccggatcattcttatgacctcagccatccattgccgcttgatctgatcatttgaaaccaagactgctcgtcgttctgttctcatttcatccttgaagctcatgttggtctgttcgggctccagtttctgtggactctacccgctaggatagtattctttcaggatggcttcactttttcatattcttttaagtagagccagacctgtcaggaaaaagcgaataaaccgatcaaaaaatcagcaaaagatccgaatagacatttctgttatatgtaatttatataaatggaaaacaggcatatgaaaggtgctcaacatcattgatcatcagagaaatgcaaatgaaaactataatgagatatcatcccatcctagttaaaataccttttatccaaaagacaggcaataacacttttccttcactagttcagcaaatttggggcaggctattttttcatgtttccatataatgtttactactacttcttttttttttttttttgagacattgtctcgctctgtcacccaggctggagtgcagtggcgcgacctcggctcactgcaagctccgcctcctgggttcacgccattcccctgccacagcctcccgagtagctggaactacaggcacccaccaccacgcccggctaatttttttgtatttttagtagagatggggtttcactgtgttagccaggatggtcttgaactcctgacctcatgatccgcttgcctcggcctctcaaagtgctgggattacaggtgcccgccaccacgcccggctaatttttttgtatttttggtagagacagggtttcgccatgttggccaggatggtcttgaactcctgacctcatgataagcgctcgcctcggtctcccaaagtgctgggattacaggcgtgagccaccgtgcctgtcctgtaactttcaaatgaaccaagtttcttttcaaatgagccatttgaaaagaaattagactaaatattatcaaaactaaggacattttccttcacaactatatgccattaacacacctgacaaaattaagcataattccctaatatcacccaatatctactccagattccatcctccttgtttatcctcaaaaggtcttttacagctggtggtggtttgtttgtttgatctgggatctaatcaaggataatattcggtttctatgtctctcagttaatctagaacagtggtttgcaaagtgtggtcctgggacaagtggcatccgcatcacccgagaacttgttagaaatgcgttttcttccagcctgcctcaacctttagaaatgcatcttccctgtggtgatgtgtaacttctatcccatttttccgtttggtagaagttagatcctaaggcttgatttgaattgagttaaatacttagttaagcccacactataggtgatgctgtgtacctcttaggcatcgcgttgggaggccagcgcctggttctttccaattagtgatgctaaatttgatctctgcattaaagggacagtagtctgtgttctccctggtagaggtatgtggggtgctttggtgttttgcagcaatctgtagggtgattcttcggtattgtgcaagtatctagtttttcattagcctttaatctactggtgttattctgcagttgttgagtgtagtgttctgtatgtatcagtctggagtttgtgttgttctggtcttctgtgtcctctctaattctcttgtttgcttattccatcagtaataataataatatataataattattatatattaatatataattattatataatatataataattattataacatataataataattataatatataatatataattattatattatatataataattatatattatatataattattatatattatatataataataattataatatataataatatataataataattatatattatataataataattatatataatatataattatataataataattatatataatatataataattatataatacataattattataatatataataattatatataatatattaataatattattattactattattaaagacagaatcttgagctctgtcacccaggtgcaatcatagctcactgtatcctcgaactcgtggcctcaagcaatcctttggcctcagcctcccgagtagctgagattacaggcatgcaccacctggctattcttttttactttttttttttttttgtagagatggagtctcattatgtttcccaggctggcctggagctcctggccacctgccttggcctcccaaagtgctggcattacaggtgtgagccacgttcagcatgttccatcagtttctgagagaggtgaattaacagctcccacttcccattctgttaagttttgctttatgttttgagactgttagatgcatagatataaaagtgttacatcttgttaaatttcaattgtgtttcttgtaagtggtatgtagttgtttttaatttactctgacaatattgatcttttaataggattatttactcagttttctttaaaagtattactgatgtggtagagttttaatcctacataatctttaagtttttaattgacatacaattgtacatatttagagagtacagtctgatgttttgatacacatgtgtattgtggaatgatcaaatcagggtcattagcaaaaccatcacttcaaacacttgtcatttctttgtggtgagaacattcaaaatgctatcttctagctatttttaaatacacattgttgttaattgtagtaaccttactgtgcaatagaacaccaggacttagtcctcccatctgactatagcttcgtgcctgttgaccaacctttccccgtcctcccttctcctaccctctccagcctctggtaaccaccattctactttctacttctatgggataacttctttagattctacataggagtgagatcatgctgtttgtccttctctacttggcttatttcacttaacacaatgttctgtaggttcatccatgtcacaaatgacaggattttattcttttttatggctgaatactattccattgtgtatatatacaccccattttaaaaatgcattcatctgttaatggatacttagttgactccatattttggctattgtgaattgtgcttcaataaatgtgggaatgcagatctctctttgacatactgatttcttttcttttgtttgtatacctagtagatgaattgttggatcatatgatagttttaaattctttgaggaacctccataccgttgtccataatgattgttctattaatacttacagtcccaaccgggcacagtggctcacagctgtaatcccagcactgtgggaggccgaggtgggcggatcatgaggtcaggagtttgagaccagtctggccaatatggtgaaaccctttctctactaaagatacaaaaaattagccaggcgtggtggcatgtgcctgtaatcccagctactcgggaggctgaggcaggagaatcgcttgattccgggaggtggaggttgcagtgagccaagatcgtgctattgcactccagcctgggcgacagggtgagactccatctcaaaaaaagaaaaaaaaggttacagtcccattaacagtgtataagagttcccttttctccacatccttgccagcatttgttattttctgtctctttgatgatagccattcttattagggtgaggtggtatctcattgtggttttgatttgtgtttccctgatgattagtgatgttgaacattttttcatatacctcttggccatttgtgtgttgtctttggagaaacacctattcagatcttttgcccatttttaaattgaattatttgtttttttgctattgagttgtttgagttccttatgtattctggctatcagtcatctgtccttttggatgattcaagcatttttttattccttcatttctctcatctattattattattactattattttaagatatagggtctcaccatgttgcccaggtaggccttgaactcctaggttcaagcagtcctcctgcctcagcctcccaaatagttggggatacagccatgcactgccatgcctggcttagatttttagtaatatgttttgttttattttattttattttattttaactaatttatttttagacagggtctcactcccgttgcccaggctggagtgcagtggcaccatcacagcctcgacttcctgggctcaggtgattctctatcctcagcctctcaagtagttgggacaacaggcatgcgccaccacacctggctaactttttgtattttttgtagagatagggtttcaccatgtttcctatgctagtttcaaactcctgggctcaagtgatccagccacttcagcctcccaaagtgctgggattacaggtgtgagccactgtgcccggcccgtttttaactcccaacctttgacatgctcacttgttattggaacggaagtggcacagtggggagagaggagtgagagcgtctccccacagtggatggctcagctgttcgggatgtttccagtgggatcacaccatggtccagggtctggtctgcatcctaatgggcttgaaaaccagatcttactggcttttcccacaccccacaacttgagtccactcatgctcactgattgtccctaaatggacctgcagagccagtggatccccttgtggtgagaaatgcactcacatgagcttgggcagcccttctctcctgtctgtcagcaggctcctgggagtgggtgctacgtgaacttggacacaggggccaagggctggacaggtgtggaatgttgagccaggccccaccgcctttggggcaggctggatgtgctggccagccagacctgacacctctggccagtgcctgggtgcacgcggcccgggtcggcctcagaccctccctcttggtgcttcccaggagaccactcgcttagcccctccctgaggacaggctctgtctttagatcccttagtacttcagtccctctgctcagcctcaggaaatgtgtgcatctctcttagttgagctcccaggaggttatctgacatctctcatttctgagtctttctgggagcctcagcacacaccccgcttcctctctgtgggctcctctgacgctgccttatcagcagtgtgtgtgttggggtgaggttgtgagatcggagagagagacagctcaagagttgtgatgaaaacactgaaagaaaggcagtgtgggcttcagcagcccttcctcggtgatgtttgtgcagcagcagaacttgttgagtgaccgcctttgctttatgtaaatgtcatgagttctggagaaacacaagcatggctttcgctttcttttctgttcagcaccaacctgaggttccacagccagtgtgtgccagatccagaactgaaccaaatctgcccaagagcctcagtctccacatcttcaagcccaggagtttgaaaccagcacaggaaacgtggtgaaaccctgtctctacaaaaaatctgtaaaatagggtgatttattacctccctctgggggtgatgcaagaagcctgcttgcttctcatgtgaaatgaatgagcacctggggaaccccagttgtcccggttgcccccgctcctggggtctgcaggcccaccttaggatggaagtggagcgcagcaaccaggtgtctacacaagatccactcctagaagctgcagggcgggagcagtgggccctgctgaggggtggtcttgagctcctggccacaccctttctggggtgagtttcaggaggtggatccggggcccccggctgggagaagagagtctggaagctgccctgccttggctgccatcccctgggagggagtttagctggaggaatggggcactgggtccctccctgacaccccggggcctctgagccactctggggatggaacgtagcagtgcagcatttcttcctgatcagagcgggaagctctgggctgcagagctttgatctcacagtatgtggtcagtccccggggctggctgaggtgtgggatgatccctcgtgacctggcgacctggtgctcccatgcttacccctggctctgttggggtgagccgaggcctcatgtctgagctgaggttgcttgttgttcagaaggcaaggccgaggcactgcctctgggtggatgcttgaaccccctttatcccacccttgccttggctggtgcctgggcaactctctgttgaaccaaaacctcttatcagcaactgataagtacccagccttgcatctgcagagcaaggcctgacccagagccagggttggcagctgcagcaggagtccgttacagccaagattgcgtaccagtctctgcggccaccaccttttcatgatgagagcagccaagccacagtggggtgtggaagaccccagccctagcaatcacatcccttccctgtggacctggggacattggcacctatgagttagctcagtaagctgaatttcctgctgcccataggaaggaccccgtgagaccttgacctggcccatctcgttccagagctgttggttggctgggagtggggtgagagattcatcacaggcctagccctggcaaccgctggactcccctacactaggcttagtgtgtgtccacccccaccgcacacatgcacaccttcccagcggcagcgctgcacgtgtgcctgctggtgccttgctgcaagggaagtgggcatgtgcccgcccaagctatttttaccctgccttgtccccacagagctgttctttggctctgagttagtgcctggggaatgaggccgttgccagggctgggggtggatgagctggaacctcggagcttcttggactcccttccccaggcagcatctcatcttaatgcttactaaagggtgtgactcgtgtgcagggcgaccttccataagagtgggcaggagaggaccctggtggggagaaagaggcactgatgtttggagggcaggctctggaacctgcaggtctggcttcctgcagccaaaaaaacccagccgagctgcagcccagtgagccacggtgggtagagggagaggtcccaggggctggatgggagccaggaggccaggaggtaccctggattgttttccttcaacacaatgacgacaatagtagttcagttttggggtgtggtggtgtgtacctgtagtcctagctgcttgggaggctgagctgggaggatcacttgagtcctgggagtttgaagctgcagtgagctgtgattgcgccactgcattccaagggtttttttgtttttgttgttgtttttgtgtttttgttttgttttgttttgttttctgagcactttctgtgtgtgctaagaccataaagtgcttaggatgtgtagcagctcatttaatcctaatcacagttaactccattttatagatggggaaactaaggcactgagcagttcagtaaccctgaagctgcagagctcatgaatggtgaatggtggagcagggctctggcctggccgtctactccagagcttgtccttaacgccaccccgcgcctccttttgccgtgtgttccgcgccctcatgacacaaggcattgtcctagttccctgtggcagcctgccaggcaggtggttccctccccgtgtttacatcaggcccagaaattaaacagctgatccagcatcagacagtcaggcagtgaccacaccagagtcggcacccaggtctcagggtcctgtggctgtgctgttcccagctcatcatactgcagtacagtatggttccaccacctgccatgtgctctctacagtgctaaccactggggttctgacatgtaaatccccatagctacccacttagggtccttgctctcacagggaaggtggacatgtggtcacttggggtccatgtactctgtgtgtcagctcagggaaacgcagggtgctggcgtgtgcctgtgaggtggctccccatgggggaggtggggagggagaggaccagatgctgcatccgctctgagagtgtggacagtgtggcattgttggccactctgaggctgggacggcccccacgtgtattgatacttggccttttcagcagccctgaattcatcccttgccaacttcctacaaaagaaggggtgacttggggcctgctggcaggcgaacacggctctcaagactggagagggccccacggcaggctgtgtgcctctaggttcccactccctgctggggacagggtgggacagtgggacagcgaggtaggggtgcaggggatgcagacctgccctgccagagtggctggctggatcctgttctccagctctctccagaatgccctggcctcaggtaattcctcagcttggcttctctgaggagggtgggagtccctcctggctgctcgtctgtccaggacattgctggctgaccagccggggacccatggctgtaggaatagctcaccctctgttgcctgtagcccctcgtgaggccaggtcagaatttacggctcctaccgtgaccgactctccggtgtaaattgtcacgtgtggccccctagagctgccactgaggtggagttgactggccccattctgtaggtgaggagccaggtgctcacaaaggtggtcacttgtccaaggtcacatggcttgtaagtggctgggccagcagggccggaaacccagactgctaggccccagagctgagccctcacccaagcccacccccaggggcctcctggggcttctggaggaacacgctgctgcatccgctctctcccttcaccccggggtccgctggcaggtggaagaaagcctggggtggtgtggccatgtaccagccaagcctgtgggcctatggtggctggccctgtgtcccagggtacagggagctgtgagctcagggctggctctgggtcttgagggacagagccctggcaagtcagactgtgccagagacaatgcccggtgctgcctcctgaggataccacactgtcccttccccaaaggcccccaaaagagcagacacagcctttctgtgcaaaccctgggaacaccaggccaagctccaggcctggacatgtcactgatgctagggtccctgggtggtgactggacggccgtgtgtggactcctttttcacacagcaggcgggaatgggcaggaaaccggggctctgagaggcagtcttggaagctgccctgggcacagaccttacttgctgaccccggccacctagaaacatgagctctggggaggccctgtccctgccccaccactcctgccagccctccagagccaggcttgggtgggcgcctctgtggtgaggatgtagaccgtgcagctggggtgagcgggcagctctctgggcatcctgacgagcatagtgcggtgaggtggggtgatggtatcctctcccatgacccccagtctacttggaagtatgctcaacagggggctccgcgtgattcttacctgcaggcagcctggccggagaggaacccaccgcctccagaagtctgtgacccccaggccatctggaaaccttatgagggcaatgtttttattatggccaagttcttccttttcctctgcaactttatctaaaaaacatacaaaagggaaattggccaagaagagtcctagtatgcttgactccgagttctcccagcccatgaatggtggctcaaggagagagaagaggctgcgttctggcaccttccagcatctcccctccaggccggcgggagaaggagcaagggcttccaccagacccttccccagagggccggggaaacaagagctggggctggggactttggccctcagggaggagcaagggtgaccatggcaaataccaaaccaaggggatcttgggacaggcataaaccagtactgtcctgggctaaccaaggcgtgcagtaaactgtctttattatatttgaatttagggggcaaactactagaaatggttttaaagttataattaaaatttccgattgccttggacaaacaactgtgggttgaatgaaaaagtattaatgttgggaatagccatttttaagagaaaaagctggagagagtgtgtgcgcatgtgtggccaggcaggtgaggacttggtgtgtcagccgggtgtcaggtccctgcaggccctctgtgaactgcaaggttccagggcagccactctcccactctgagcctcatcttccccaggtgtcagacggagctgatgaatcccagatctctgccctgtctaccccaggcagctcgcacggggctgttgtgagggatggggtgtgtgagacaggcgaggagcttgctgaagggctgggcagatgtggactctgcttagtccaaggctgaaagcctgcccgaggaggtggtggtcttctttggagggtgggaacctggtgcccctgcttctgccctgcctgtgcctgagccaagccatttgaggctgctctctccacccggtcaggggcttgggccagctgctgggagtatcaggacgctgctgtagatgttgggtgagagggcccggtggttccacctgcatgtcatgagccaggtgttagtggggcagtgcccggcacacactcggcctctgtgtcctcgtgtcagtggccagaggccacgtcagacacctgaggagcaaggacgctgatctgcactgggccctctgcctgcctctgggagctggtgggccatagcctccccaggatgtggctgtagggggaaggtgggtgttggggaaacagaatcatgtccggacccggctgtaaactcccacatggccccaggcaagacccttcacctacagaaaggggaaaagaggctcagctcatcgggctgcggtgaagtccagaagaaacaccattgccaagttgctgagctctcacatgagccacagggcgggcattcccagcaagggggaactctcgctacccgtgtggccaggaaggtgaaaagtttgcagttcttcctggccaggtgaaagaacagaccaggcgcattgtcctctgagagccccaggtctcttctggtctccctcctgccttgtttctcttaggtgtccccgcactaacctgcagtgtcctgtgagggcgttaagtggatggacgtggaagttgctgcgttaggcggcatgctaaggagtcataattagtcacatgtccctataaaatgtgctctccttgttgtcaccatgaggtttgaaaatccacaaagtgtgggaggtgtcaaggataaatggaatcaagtgtgtggatgcaaaggcaggcggggtggggggccctgccctgccctgccctgccctctggctggaggacttctgatgcgctactctttgagcctctgtttccccatcagtaaaatggggataatgatcactgccctgaagagctgtcatgaagcacaggtgggataatatgtgaatgcccagctcggtctctggaacctaatggctgctcagtgatgctggtttccttttgtttctactgggatgcagcttcaggcttggggatgaagagcttgcttagggcacaagatgtgataggttgggagccatgtgaccagattaatgacatgtgggtggaaggggccctgggaaccctggggggattctcattacacaacctcagtctccacagtctctgctgttggcgtgcccggctcgctggtgtacgtgttattggtccatctggtgctcagcctatcacagcacaggcaggaaccaggctcatgataatattgccatctatttttagcccaggggtctcctggtggggacggacccccaggagggctgccagctcactggtagcagcagacggctgcacatgtctgggcaggcacatccaggcctgtcgctgagcagcttcttcagctgtctgagactccaggaggcttttcacagcctgtttctgttgcccttcttgtagtctcgggactgcagggtcctttaatagggtgccctgccagccctggctgaggagcacaccaaagaaccttgggaacaggttgacatctccaatgggtcaggtagaagcggtgccacctgagaagtacctacttcctcagaggtgaagtggccccagtaagtgatttacagagagctgcccctcggtctagggccaactctgaaccaggccgaagctcttctatctgatgatttaacaaaaggtgccagcatgtctttatcacacactgtcattatgctgggccccagacccagcacaagcaacgctcagaagtgaggcctggcattcttgctcccagcaaggctgtggcagggcccagacaggcagttgcctcctgggctgggcatcacatcttctggccagggtttattcattgaggtcctactgtgtgtcagatgcgaacgtgaaatacctcatttaatcagcacagtgatcctgtaagattccattgccattcctgatttacagaagacaactgaggttcagaggtgttccatgatgtgcacagggtcatgtagggtggatcccaagttgtgcagctttcactgcaccatgtggcagcagactctactagatcagggttgttggtcctaaaagctgttcagtgtgactgtgcccttacaccgtgcaccaagaagccttctagaagccgtttggcttcctctgacagacttttgtggtggttttaccagtggagggtgtccaggttcttagcgtcttgaacaaaaattggacaaaatgcacaaacaaaacaaagaatgaagcaacaaaaacagagatttattttattttattttttgagactcagtcttgctctgtcacccaggccgaactgcagtggcgctatcttggctcaccgcaagctccgcctcctaggttcacgccattctcctgcctcagcctcccgagtagctgggactacaggcatgcgccacctcgcccagctaatttttgtatttttagtagagacggggtttcaccgtattagccagggtgatcttgatctcctgacctcgtgatctgcccgccttggcctcccaagtgctgggattacaggcgtgagccaccgtgcctagagatttattgaaaacgaaagtacactccacgggatgggagcaggcccaagcataggggatcaagaacctggttgcagaattttctggggtttaaataccatctagaggtttcccattggttacttggtgtacaccctatgtaaatgaagtagtggcccacagtcagtttgattggttgcaggaggggaccaatcagaggccaaagtgaagttacaaagttacaccctatgcaaacatctgattggttgcagaaagcaatcagaaagcaaccaatcagagactaaagtgaagttacaaagtgatattcctatgcaaattaaaacttagcctgtgaccagcctgattggttgcaggaggggaccaatcagagatactctcagtttttcatctgccaggcagaaaaggttggggggcgaggaggcggtgcgggggggggggcggtggggggggcgggggggaaggggatgcaaagggagtagctacttgggctcggaaaattggggttttccttttgatttagctctaggaagtcagtgtgaatcagccttatgttccctgcctccagaccctattctgcctcagtgggggctctgatgtgccaaccagggtgccctgaataaagtggctagcctgactgtggcccttcttcgtggatggctgttcctgggagttctagctcctcactagatgctcatgagtcagccagtatgagaggtccctgggactaatcacctgccaggtgttcccacgcttagggttcgggatctgggcctcctgtacccaatccctgctgttttggcctggctgatgcccttgtggtctgattggaacactgagccctgggaagctggcctcacttatcttgtctctgctctctctttcccagggcagcgaggtcacaggccccacctttgctgatggcgagctcatccccagggaacccggcttttttcccgaggacgaggaggaggctatgacgctggcgccacctgagggcccccaggagttgtacacagacagccccatggagagcactcagagcctggaggggtctgtcgggagtcctgccgagaaggacgggggacttgggggcctgtttctgccagaagacaagtgagttaaaaccacctgaagctccatatttgccctctcagcccagaaatgtggttcttggaaagtgtctccaggaagtaaatttgaaacatgctcaaaatttgtatcagaggcattagtgtcatgggtattctgaatagcacaagattctaagcagactaaatgcttaacagtaagggatagttttggaattttaggcagctgtgcaaagtcaagtttttaaatttaattttactttattttcagtcctagctgtgcaggcaaagggagttttaaatgactagttaataatatgagatatatgatctcaattagttttaaaaagcaggttgtggccaggcatggtggctcacacctataaccccaggactttgggaggctgaggcaggaggatcgcttgagcccaggagtttaaggttacagtgagctgtgatcacatcactgcactccagcctggcaacagatcaagaccctgtctcaaaaaaaaaaaaaaaaaaaaagggcaggttacaaagatgtccatgagatcagctttgttaaaaacacaaacatatgccaggcaagtggcatgtgcctgtagtcccagatacttgggaggctgaggcaggaggatcacttaagcccaggacttctgggctctagtgcactatgccgatcggatgtctgcactaagttcagcatcagtatggtgacctcccgggaatgggtcaccaccaggttgcctaaggagggatgaactggcccaggtcagaaacagagcaggtcaaaactcgagtgttgatcagtagtaggatcacacctgtgaatagccactgcactccagcctgggcaacatagcaagaccccatctctaaaaaaaccaaaaaacaacacacagacatatgtgttaggaaatgcctagaaaaaaattaatctggaaaattaagcagttatttctgtatggtgggatgattttttttgttgttgttgttgttgagacagactctcactctgtcaccaggctggagtgcagtggcatgatctcacctcactgcagcctccgcctcccgggttcaagcgattctcctgcctcagcctcccgagtagctgggactacaggcgcgtgccaccatgtccagctaagttttgtctttttttttttttttttttttttttgagacggagtctcgctctgtcgcccaggctggagtgcagtggtgcaatctcagctcactgcaacctccacctcccgggttcatgccattctcctgcctcagcctcccaagtagctgggactataggtgcccaccaccacgcctggctaattttttgtatttttagtagagatggggtttcaccatgttggccaggatggtcttgatctcctgacctcgtgatccacctgcctcggcctcccaaagtgctgggattacaggtgtgagccaccgcacctggccagttgatcattttaattacttcccatctactctgctatattttctatattgagcatgtactcccataatcagaaatgttatttaaaaacagtattaagacctaagtgacttcccagtgaagcagtttcacctttaactttggtgttggcagaaaggagtcccttccatctcagccctcaccaagtctctcgagggatacagtgctgtggggtggtgggaagctgccaccattgtggctgaggaagccgagggggttgcaagtggcagccccttaccagaaggtgatggttacgactgctgcagggatttggagagggaagagaggggttcccatgttggttgaaccacatgaaattgacaacttttaatcatttccatcttcaaaaaagtaatttcatgtggttcaacctagtatatctcaatgcagggtttctcaaactcaagtgattctcagagtcctgatgttcttggtggggccctttgggtctgtggatggagaagaggggccgtgctgctcgtgctgctctctgggagcagccttgtaatcccagcagtttgggaggctgaggcgggcagatcacctgaggccaggagtttgagaccagcctggccaacatggcaaaaaccccatctctactaaaaatacaaaattagctgtgcatggtggcaggaggctactcgcagctactcaggaggctgtggcaggtgaatcactagaacctggaaggcagaggttgcaccaatgcactccagccaggcgacaaagcaagactctgtctccaaaaaaaaaaaaaaaaaaaagacaaacttaaaaaataacacagtataacaactatttacatagcatttacattgcattaggtatgataagtaatctagagacgatcgagtatacaggaggatatgcataggttgtatgtgaatactatgccatttcatatctgggacttgagcatcctcagattttggtgtccacagggggtcctggaacaaatctctcttggatgccaagggatgaccatactcagtcttacagtatctaaaattttagatccatttatattcattttctgtattactccgaatgtttttttttcctctccttaaagtgaaagcaagtttattaaggaaataataaaacaatggctactacagaagcagagcagctactccgaatgtttttttgtttgtttttttgtttttgttttttttgagacggagtctccctctgtcgcccaggctggagtgcagtggcacaatctcggctcactgcaagctccacctcccgggttcacgccattctcctccctcagcctcctgagtagctgcgactacaggtgctcgccaccacgcccggctaattttttgtatttctagtagagttggggtttcaccatgttagccaggatggtctcgatctcctgacctctgatccgcccgcctcggcctcccaaagtgctggggttacaggcgtgagccaccgcgcctgccactactacaaatgttttaacaaacctttcaacaactatttgatattccacaatttaataatttactaacattataatttaataattataatttgatctagctgtagctagacaattaggttgtaagcagtgttttgctactgtggagtagcatgggtagaattggtttgaactgtagaaatggtttctgtggtgagatgtttccctttagatagggtccctgaaatgtacttaccaggtcaagagctacaaacttaatcggtagtgccaattaaagggaaatgcctgtcagtttccccaccacgggctgtggctggggacccatgagtcctcctctgacttgggtgctctcggaccctcaggtccctggtccacactccatccatgacgacctcagacctttctacacactccaccacctcgctcatcagcaatgaggagcagtttgaagactatggggagggtgacgatgtggactgtgcccccagcagcccttgccccgatgatgagaccaggaccaacgtctactcggacctggggtcttcggtgtcttccaggtggccccttggtctgggatgtcatttggggtcaaaagttgcagaagcaatttaagcacatcctagggggtgggggggtgcgagtcctgagctggcccttttcctttgtcctcagctacttgagttctgctcctggggcttggggttgctaccttcgcaccctgattaggggtcaggagttcctcctgaattaactgacctaggaggctgcacactgggggccacggggctctgtgtcatcttgtatcctagaacctcagtgttgaagcatccttccaagtgacccctgtgatcccttctcacccacctgagtcaccactttctctgaaatgagctcgcagtttgccttagctgttaaatgggtatgcctcactggcttctctttgagcgtgttggagaagggatgatctgttgctatatttccactccctgcccctcccccgtaacaaggttcaaaggtactggggactcaagtaaagtcagctcagcagggtggtgtagggcaccagactggacagcagttaaggtggtgattcctttccctcatgaatcagtgcggggcagacgcctaggaaaatgcggcacgtgtacaacagcgaattgctagatgtttactgctctcaatgctgcaagaaaatcaacctgctcaatgacttggaagcccgactgaaaaacctgaaggccaacaggtgaggcccaggcccagctggggggtgagaggccggggggccagggcagggcctggagggagaagctacgggcatggcgaggcgacccctgctgtctgggcaggtgagagctctcagaggagggttgatccaggggctttttctgccacaggaaatcaggctgtttcttctcaggaccaagctgactagtgaattcctttcagtgggagggaagagccttgtcctgcactgtggtgtcttacagctaggacagagtaagggagtggactagaacccctctgttcaatgactgtttcctttctctctctagccccaaccgaaagatctccagcacggcctttggacggtaaggcccgcctcgagggagggcaaattgagtgctgtccccatgctgcccactggccggggctccctgccagcagcccggactcagctggtgcccgcatgtggctgagtgagcagaggggaacgaggccatcccagggcagtgcagccagggcagcgtcacttctgaaaaagaggggccagctcctccctgctctctccccaccccttgtcccttcttcaaatcctaggtcaccttgacttcaggcaggcatgccagggatgccctgagagagacagagcaccccacagcgttcagtgcccttcctgcctcttggagctggcagccatactcaataaagagaccccgggtttcctgcaggcggggatctgggcatgagtgtgcgccattggggctggtcactttgctccgattaagtcctgcggcagttcagtgtggccccaggtccacactcagggctctgggagctggcagcaagggcccaggagctaggtgggttggcctcttggcagagaccctggctgctgcctatcagggagctggaaggggatgtcactgggggtggcagctggattttgcctcaggcacgggttagctcagcaggcccagtcccaccccagctcactgctctgcaaggcctggagaattctctgcctttgccatcccccagagttcccagagacgtagcaggagccagcttggtggagaggctcaagcctcaggaggcccagaccctcttccagggccatggagctgggctacctccttgggggcttccccactggaagaggagggggctcacgtgccagctgaggtcactgggtagctgcaggccagcatgctggcgtgaagagggttctgaggccgcaggagaagctgtgcgtcattggctgtgtctgccaggggaccccgggggtctgtacagcccatttgccatcctctgggcggggtgatccgctgagtttggcaacattcttcctctcaggctgagtgagggcagcctccttaaaggggcagaccccctggggtactggatgctcgcctagccagtagtgtgagtaggcccctgtctctggaaggcccctgcagccagacaccctcctcccacccctgcaggcagctcatgcacagcagcaacttcagcagcagcaatggcagcaccgaagacctgttccgggacagcattgactcttgcgacaatgacatcacagagaaggtgggccttgggtggctggagaagggactgaatgcatgcctgctcccaggggagatggggtgcactcaggctactgtctggggacttgggagaccctgtacctgcctaggaattgggggcaggtggccctggtcacgtgttccccactcccccaccccacacatgaccgttctcagatacacagtggtttggaggtcctgctcatgaacctcatggcgtcgaggttctcggttctgtggcctcagaggtcttctccaccccaccccggccccctgctgcaggtaagcttcctggaaaagaaggtgacagagctggagaatgacagcctgaccaatggggacctgaagagcaagctgaagcaagagaacacacagctggtgcacaggtcaagcaggcagcggcgctgggggctcggccgtgacgctggggaacaaaggggggtccatcttgctaagacctccaggaggaggcagcctcatgcctttgcagctctgagggtctgtgacgcatcagcctcttgtcacatggccctgcccacatgtggtgcccaggacaggaccttagggacagggagacaggttggagcttgaccttggctctaggcccaatggattctaccccctgaggtctgaagccacagggctggtccaagatgggagtggggatccactgtgtctcactcatacagtgacaggagcctgacgtcccttcctagggacaagctctgcaggggacaggccagtgtgagctgggcggtgggaagggtccagcactgctgctgatggaggtcccctgagcctgccgttcctgatgctgtctgcagtggtggattcagggtttagttgtcctcaccagatggcatgacccttgggggacataccctggccaggggtccggtcctccaacttgtcacagggcccaaagatgggcccttttgtacaccccagaaggtcagcctggtggaggggctgttgccagtgagacgtatcccagaccgaaataccaaccaggctgtcactggggtgctcacatctacgtgcccctggccctgtcccaggtctggggcagacttcaggccaccagccaggatgtgcctattttgggagtcaaggtgcccaataagctgaattattaatcagaggggtggccgggaaggaacagcacaaaaagaagaggtgaggcctgaggtggttccggccaggtgtggctgcagggactggtgggggcggtccctccctgtgctgccctgagcgccccaccttctgactgccaggcctgcccctccatggcatgtgtgaccgacaccccctctatatgtgcggtgtccccgttcatctctctgaaagctactggcccacacgccctcagtggacatgccagtgactcagggtctcggggcccagggtcccccgtgccacagcctgggttggggtgaaatggtgcaggccccaagagcttgcccattgcgctgtcctcagggtgcatgagctggaggagatggtgaaggatcaggagaccacggccgagcaggctctggaggaggaggcgcggcgccaccgcgaggcctacggcaagctggagagggagaaggctaccgaggtggagctgctcaatgccaggtgggcccctccaccgagccccctccctcagagggaccccctgtcctggggcagccctgtgggataggcgctatccccattttatagatgggaatgtgaggctgaggggcagcctcttgagactttccagtagtaacagttccactttaataccacgagaaacacagaggcatgctcttcaggaagttcgctaaggaatgttcccaggagcgtggctcacatttggtaatgcaaaccacacaaatgtctgtcagagaaaagggcctgggctgggtctcacatccaggcctggagcgccccctgctgtcaggttctcccctgacccctggtggactgagccagagccccagggccaaggtaaatggaaaacccggctcctgtgccttgcgtgtacctgtggcttcgtcattggaacgtgacgcaggcgggacaaggagcagccccgggccagggatctgagttggtctcccattagctccatggccttggacgtactgggtcacctccctgtgtgccccacagagcggctgtgtgggtgggtgagccgatgtaagtccagaccctgcccacgggtgagggctatgatgatgcctctgtgatgaagcccctttgcggcccttgaccgaggccgaggaggccgcctgggcttctggcagagaggacagctgccctggcactcctcaggccccctgaggccccagtctccatgctgaggcttcccagagttgccgagccccacctggcggctggtgggctgctgagcaaatgactgggagttgggctctcaggcaggtacctccctgcccccgtgtccctgcccctgtgcagtttggtgaggagacttcccaactccccggtgtctgagacctgctttgctaagttacccaccaggggttcattttacattttgactctattctagaagctgctgttttgcatctgtttctggaggctggtgcctagttaagggtgactgctctcgctcagcccgcctcggcagctggcccaagagaggtggctgggacacgggaggtggtaaaagacagtgtgaacctgggccacaggacaaagtgcagaaagccagccctcgggaactgtctcctaacgtgtgcccgtcacacagctccgggggcgccattcgtgtaaaatatccgagtggtgttcccagagtcctgccgtatgcttggttccctaccacttccacccgcttggggccacctgctggtggtggggctgaattcctctctggagcccagagggcagtggaggcccagaagccatccttccaggaaagaggacatgatggggaggtggtgggttgagaacgggatgctctgcaggagtcactgccagaagtgaccctgttcagttctgctgccaccgacggcccaactcacctgcacctattctcagaccatttaaaactgacctgaggccgggcacagtggctcacgcctataatcccagcactttcggaggccgaggcaggtggatcacgaggtcaggagatggagaccatcctggccaacatggtgaaaccccatctctactaaaaatacaaaaattagccaggcgtggtggtgcgcgcctgtagtcccagctgctcgggaggctgaggcaggagaatcgcttgaacccgggaggcagaggttgcagtgagctgaggtcacgccactgagactccgtctcaaaacagacaaacaaacaaaaaactgacctgaacacccaggctctgtcttcttgtggaatccctttaggattccctttgtggaattcctgtgtgaacgctaacacagaggattattactgtcagagcccatgcctgtggtcatcagagggaggtgcagtgagcgctcagagaagagccctggatgagatgctgttggcggagaatgaaaagccaatatgatcattgccttcaaattacagagtctaacaggagggcccagtcacagaagccacaagaagactgtttctccatctagcagaaagacatccccgtgttgtctgaggatctgaaggatgcatacaagaagaatctgcgttcctactctctaatgaatgtttccacttattggaaaaataaaggccacgtgtggtggctcactcttgtaatcccaacactttgggaggccaaggtgggcggatcacatgaggccaggagtttttgagaccagcctggccaacatggcaaaacccgtctctactaaaaatacacaaattagctaggcgtggtggtgcatgcctctaatcccagctattcaggaggctgaggcacgagaattgctgaaggagttagaggttgcagagctgagattgtgccacctcactccagcctgggcaacagagcaggactctgtctcaaaaaaaaaagaaagaaaataagaatgataatttactattttgcttacaaatagtccttactattttgctttggctgataggaagctcacggctaaattgtctttgacataataatcatattctttctctcagttggtttctggtatctttcctctgggaggaagcagagaatcactgcagactggcaggcgcttatcagatagtctacattccaggtttctgagatttgtctttctcctttcgccagggtgcagcagttggaggaagaaaatacagagcttagaacaacagtgactcggctcaagtctcaaacagagaaactggatgaggtgagcagcagatccaggcttggaggggcagggctggccatcgggagcctttagtttattgcttctgaaattctaaacaaatgccgcaccccctaagaaatgcaaaaaaagtgaataacaacttgtgtttctgtatttctgattttccaagttttctacagcgaatgtatttattactttatacaatggagaaaaattagttttagaaagaggttagcttctatttgggctaacaccttcaattcaggttgcatctagcatcgttgaaggacttcagaggcctgaggtttttagttgtatttctagaatcatcggggctctggccgtttctgtaagccaagactcagggctccgtctaagggagctggtttcactgtgcatctgcctcgtgaagatggctgaccagaccccagggacacccctggacatagtgagcccctctctgggaactctcctcccctgatcgggtctccctgctccaggagcggcagcgcatgtctgaccgtctggaggacaccagcctgcggctcaaagatgagatggacctgtacaagcgcatgatggacaagctgcgacagaaccgccttgagttccagaaggagcgggaggcgacgcaggaggtaggtcccaggccagcaggcaccagggctccttccagcatccctgctcctgccaacctgcttctctccctcgcagctcatcgaggacttgcggaaggagctggagcacctgcagatgtacaagctggactgcgagcggccaggcaggggccgcagtgcctcctctggcctaggcgagttcaatgccagggcccgcgaggtggagctcgagcacgaggtcaagcggctcaagcaggtgggtctagcagtctctgtgtccagtggggcagggtggccgggcccaccacgtgggtttcctgtgcaggatctgtggtaggggagcccagagctgtagcagcactgcctgtctgcttctcagcaacctgtttgccagggctgactgccccatttcacagctcaggaaaatcgatccaaagatctctcccttacgtctatgtaaggaaatagaccctgccttggtgctcagggtggaggatgagaccatacccagctgcagtatagtgcctggaggcattgggttctcccagaagtagaccctcacccaaggttcctttttttttttttttttcccaagagacagggtcttgctctgatacccaggctggagtgctttggcactccatagctcactgcagccttgaattcctgggctcaggtgatccttctgcctcagtctccctagtaactaggactacaggcacacaccaccatgcccagctaatgttgtttttgttttttgaggcagggtctcactgtgttgcccagggtggagggcagtggtgtgatcacagtcactatggcctcaaattcctgggctcaagcaattctcctacctcagcctctcgagcagttaggactacaggagagcaccaccacacctggctaatttacttatttatgtatttatttccagagatggggtctccctatattgcccaggcttgaactcctgggctcaagggatcctcccacccttagtctttgaaagtgttgggattacaggaatgagccactgtgcctagccagaagattacatttcaaggagcgctgccttagctagagacctttgggtgggggagtggatcaggaggaggcagtggccaggtggtgctgggtgaagtgtcagctctgcctgaccctgcaggtggaagagcctgcagcataaattatccttctgagtttgttccactggggacaaaggtgctggtggctgtgctctcacagaaatcctaaaaccccaacccttctcctagtctaggggtggggtgcccagggtcccaggtgtgagcattagggctctttaggcaaaagctggagtgtgagaccggtgcatgggatctgggcgggtccgcctgggtcaactccaaccaagcaggattcggaacgtggctgctgggggagccaaggaaatgagctggccagcctgcccagagagcccagagcatcacttccttcactgggctgctgggtgggtgatgtccctatgcagggcctagggaggaagggatggccaggagccttggctgcgctgagcagggctgtaactcctccacaaaccctgtgcactcccaggatgccagtcccctggaccaggacccagccctccttgcccccagcgcttggcaaaggctgcaacatctatggccccttgaaccagccgtgacacacacctgtgggaatggcgctggcggcaggtcggggacggtggatgtggagaagtgggttccagtgggctgtggatgcctcttggggttgatgtcgccttcgtccttctctctgtaggagaattataagctgcgggatcagaacgacgacttgaatgggcagattttgagcctcagcctctacgaagcaaaaaacctctttgctgcccagactaaagcccagtctctggctgcggagatagacaccgcctcgcgcgatgaggtaaccacaccaccggctcttgctttggggcctggccgccctctgtgattccttctcccggcccccacctgcccagagtgagaaaaccagaccagggcctggcagagagtcccatctacagctaccccacatgacagggcaaggctgtgagcaggggagggggctgctggagaagttaagtcagctctgagttccgcctgtgctggaaggagtgcgggtttggttcagagtggagtgtgagtcttaggtcggccagaaaaatgccaacatagccagctgagtggatcaagctgtgactctgggttaggctatcactcccgctcttcccagtccagagagggaggacattagcatttccccagcacctgcttctgcggtgtgttttcacttaatctcctgatgactctgaggctttaggaacagctccacattccaagctgggaaggtggaacccaggaccacccagctagggagggagagggacccagctctctccaaagccaaagcctacccttcctgccacaccagagtatgcttatgaaagatcaggcctccaaaatgccccggctgcattgtaacatgaattataagacactctgtcactgagcctcaccctctgcctgggacacggggtgaagagctgacctctgtcctcaaggagctcccaggtgagctgggccccaacccctgggcagaggcagcatgtcagcaatgtccgaaagaacactgccctggagaagagcagtgtggggctgggggtggggagaggtgttccaggcaggagacagctcccctttggagtcttagcggccctgggactttgtcagtcttgattttaaatgactttggctagtgttttctacttttgcaaaaaattacccacacctgggccccctctacaaactgatcacattggaatctctgggggtggggcctgggcacctgcataggtaatactaggggctgagccacttcgactctggtcctggcatccaaatgctgaggctgtcctggggcccaccttgcccaggatctcctgatgccctctattgtcaggcactggcctgcgacaagcctgggagtctggactctgcctgcaccctatcccaggcccagccactgacccgtctttcccatttccttcagctaatggaagccctgaaggagcaggaggagatcaacttccggctgaggcagtacatggacaagattatcctcgccatcctggaccacaatccctccatcctcgagatcaaacactaaggcacggggctggctgcagagcagccttaggaccctgggaccaagggcagaccctgcccaaggatgcaggcctaagccgggcctcacactcacactgtaaatgtctctctggccaccatgcgttacgtgtacccgtgtatatgtggggaggctgtgcacacgagcgaggggtgagtggccgtggctgtgggcagcatccacacggttagccgtgcatgcactttgtggcccctttgcaaggggcagagggtactggaagtgggaggaggcaaggtctgctatcaggagttactgtaaaaacaagaactggaagctcgtgtttccggtactgggtaaaatgattctacctctggggataaggattcacattcgctctagtacgatgggctctttcaccccactcctagtccccttgggagtgggagcaaaattgtgatctttcctaggagtttgaatgccccatatttgtgtcctcgccagctctttggccacctttcaagccccagtgttcaagctcagagaggatgaaggggcatctggagggtccatgagatggggccctcaccaaatgccttggccaccggccagcagccctctgtgatgtgtgtgcagagtgaacagaggactcaggtttcatagcagctagtgcggggcatcctcatcctgtacctatagagttcgtgcactcccccatccatgctacctacctccccgtttctgtttcagttttaagacaatgaagcagcattcactgcgtcattgtaacatgaagggataaaaatgaaggagaaggagggtttgggatgggtgtctaaggcaggagttgacatcgggcaaccaaagaaatgagttttggggaggaacacaactcccatcccagtcagtttccttcccatggctgcatcttaagatggatgcacggagaaaccgtctgcctggctccctgtcttcattctccacgcagcctggtgatggcaggcctgggtttggatttcagaatcctagctccgggctccactcgtgtggcagcaagactgcttcgttccagcgtttagaaacacacctgtatttgattctcagccaggggagcactcgctgcactggtgggaggcggttgggaaagttgcaggaaaaccttagtcttccatccttctgacccatggtggaaattcacaccatggatttttaatggatctttgttctaggcagctgggaatagacatggtacttaccttagagttttccaatttatctcaattttatatggcttgtgattcattttcttaatccaaatatatataaacgtgtgtggtcttattcttccccctgcagtttcttgctttcttcagcacatcttatagtatgagaaggaaggtttgggcatgttgggaagggcggtggagggggagttgcagaaagagagggcagtgagggtgaggagaggggatctggggacttgggtgtgacacctgcttgacagaggcagggctgtggccaggaccaaccttcaattccattccaatcagcctttgcatttgttggatctcgtggcttctttttaatcttttgttggggattagtttcatgctgcacataatggggttgcactggtctgacccaggactttggagccacccacactgggaagactaggctaggcagtcggtcttctaggagtttctcagccccttaggacgcgggtctccttgggctcccccaagggttctgcgaagaggcagtggaagaaggcatgaggagagggtctcttgagaatttgccaataggaaggagtggccacggctgaaaggaacaagacagatcctgacatagctttggcctgggtgttaggtcagaaggagtactggtgcgtgggggccttaccccagggttgagtattttatctgtaaaatgttatctgccctttggctgcattggaatttcagagaaggctgcagaggcctgggttacacagcctgagtcacaacgtgggaaggaatctctgccacgggaaaggtgggcggaagcagctggcagcctggggcgtgcttcaggctcctccctctaaggggcgccatgggaacaggctccggagggagccggcgtctgaaaggcccccgggacctgctgcagtgccagaggggcctctggagcaggcctggcttttaaatggggggctgaattccagctcacacacacctcaagtccaaccttactttcttcagccagaatacatttcttgtaaaacctggcttgttgcttggcttttaaagatggtgtatgtttgtaaaaatattcttctgggctcaaaagctagcttgagggggcagatgccccaggtgtcccagctccacagcccctggcagatcccagaccccttggtggcaggtcccagagcctaggtggtaggagcttgatctttgtttctgcccttacccctcagtagtggggctgcgaggtagtagacaggatgcccagttaagtttgaatttcagatagaaaataattttagaataaatatgttctatctaatacatgggacagatgttatttttagagataggatcttgctctgttgcccaggctggagtgtagtggtatgatcatagctcaccacaaccttgaactcccaggctcaagcgatcctcccgccttaactgcctgagtagctgggactacaggcatgcaccaccacgcccagctaatttttcttattttttgtagagacagggtctcactgtgttgcctcactcgagctgctgacctcaagtgatcctcccacctcagcctgccaaagcactgggattacaggcatgagccaccatgcctggccaggacatatttgaaatggggagattttaaaaattctgatgattagactgaatcctcagacgttctggtttgattgttgtgggtgtagcccaggcatgggattttttaaagagctgctcaggtaattccaatttaattgcgtgtcctacttgggttttttgtttgtttttattgtttttgctaaacctggcaaccctaccgagtagggattagcagtaacttatctgaaatttagaggtgttttgggggtggggcgagggtttctgtagtagactcagattttacatggccctgagctgcccttgcgttcagttggaagccacgcaaaatgaactgaaccaggagtgagcttcgtgtacattatctattagaaaatgaagtaccttctggttcagctagtccctgtgcgttgagaggctttaagaaacttctagtaaaaatgtttttttcttttagctttgaattggccagagtttatcctagattattttattttaaattggtagaattctttgcgaactgtcacagagaaattccttttcatgactttatttctgacctattaaaacatgaacaggccaggcatggtggctcacgcctgtaatcctagcacttgggaggcagtggcaggcggatcacttgagctcaggagtcctaaaccagcctgggcaacatagtgataccttgtctctaccaaaagttaaaaaaaaaaaaaaaaaagctcaagaacctgcacgagggcctaaaacagtgggctcagctttggctgtgcattggaatcacctggggagatttgtaagcttctgctgtctgggctgaacccccagaggttcggattgaattggtgtggggtgtggtccaggcatcgagatgtgtaaagacctccccaggtgatgatatgcagtccgaggttgagactgccctgtcctgcaaggtcgttggccagaggtagaggaaactggtcaaagtggctgttgggcttgtcaagcccgtggctgaatgacagtgagctctcttgctgggagggttccttttcctgttgttgaatggtcctggcctgcaggatgggaggccagatgccttcaggagctggtggatccagctgttctcaccagcctggaggttagcagaccagagtgggtgggcaggaccttggcctggtgcccctggaatcagtgggtggcatgtgttgggatatactggctacaggctcatctcaaagagcaggtagaacagagtcagcagggaactgacaggtggggctgtccccctgaaagcagccgcagaaacagctgccacctatttgcatagctgagcaggaggacatactgtctttgtgggttttgcttctggtctgtttcctgactgggttgataaagggagtcccagctcgttccctgttagccaaaccagcatcctactcacacaccggacactccaggtgctagtccactggtgctggtgttcaggggagttggggggggggggcgcggggacagaagcgcgggttcttggttccaatgagggacttagcagaagcctccaggggccagcagggccaggtgaaactgggagaaatgaagccctctgtgtcctgtgtgtgtggtggggtttaatgcattagcaaatttaaacttaaaaactaactctaggccgggcacggtggctcacacctgtaatcccagcactttgggaggccaaggcaggtggattgcctgagctcaggagttcgagaccagcctggacaacatggtgaaactcttgtctttatttttttaaaaaaacaaaaagtaactttcgatgtgatcataccaggaaagttttgcgtggtcaccatgccaagaaaatgactttggttgcccagcagatccacagcgactctttctcaagggctactgtggattctagattgaggaaaggggccacttaggactcagtgctggtatcctccacagtcctttctcccagactctggccctccctttgggacccaggaaatcccctctagggtgacgctgctggctaggaagactgaggtctgctgcgccaaggggcctcaagttagaagggccatgccgtcagtggatgactttgagcgctgatcctagggacctgccaggtcctcacttcctgccctgggtgcacacatgaatggggcagccagcaggaagcgggagaggctggaaccaggagcctgccctacctgcatggcaggacaactctgaggcccttctgccatattctctgctacccaccagagaaaataggctgccttctagaaagatttgtttctaaaagcgtagaccctggggaagtataatgtcaccatgctcaccaggcgaggtttcccatatgacctccctgccccgacctcgtaggttgctcctttccccatctgtaaggtagagatgtctgccccggagctaccagctggggatggcatccaggccatgtctcctgcaggatccaagtgctgttgtccccagggtgaccctgcctcctgctggggcccatccgctttgctgtgctgcacaggctgttttcatctgcatggtttggggtctttgtccttgtgccttttcttccccatcgccactgtacaggattttccacattgcccactgcctccttttctacatcgtctcatctccctggcctttcccgagccctgtaaatgtgtactttttcaacgtgcctcccccaggtgaggccagctctcccgggcacattcgtccacaaggatcaggccccacttacccttggctcgctcagcctgtagacttggtaactttgtacagaatctttcattattgtcttaagcatggggggctaggacccacttagtccctcctccagcctgcagctaatttaggagccttgcattccagaaaagggcaactttgtgtaaagcagcttctcccacagagctttccctgcattgttagtgatgtcgggcaaagcatcactctttaacctggggcattggccccagcagggatatcatgggaccgcagccgctccgtgcactgtctctgcccccagaggaagccctgtccatggttcctggtgcacggccacaggcctgccttgaggccaccacatctggtgtctagaacagctgcgggccccacttgggcagaaggaagaggtgctagctgctgcccctgcctgctgtgaacacctgcccagcccttccttgtctgctgaggtgctcagaccagagtgccattaaataccaactgatgtcacggagcggacggtgcattgccaaggactcacagctgtgggctcccttccagctcctcccactttcttggctgggtcttctgaggcctacgtggaatgaactacacatgtggcctcatgcccaagggtttgttagatggcctctgactctgtgggattcaacttgacttttttgccccaggaggctctgtctggaaacaggcttagctttagtgctggggtgggacctgccctgtgggccccagggaggggacagtgggggtgaggccctgaggctgtccagggtctgagctctttgcctccaacctgcttctgccccaaaaggaacaggctgttggtggcaggctcctcccggggagctgtactgtacagaccaaggtgtaaataaacagtttgctcttctcgcctgactgaaccatgagtttctgtggttgggggagggtgggcagaagaggcctggttccagggctcacagggacagatggtctcccttaaaaagagcaacccccctgccccccaccaagtttgtggttcccagggtggctggtgctgtcccccaggggcagggtggagtggggcggtgtcactcttcagtccctaggggagaagacgtggatcccagaagcctctttaatgccaccattccagccacagggctatgatgtttggaaactttgtcctttgtgtggctatgttctttcccactgaggtcttcctaggggtccagtggggtcccagtgccatgctccctccatgtccgccgctgtggctccccagggtgacggcccaatgcctccattcaggactggcttcagacctgccagtgcttgtctctgccacaccatcaagtaccaaggtggtccccagttgagtcaaccagacccctggatttctgccttctgtctgctccttcctctattacaggattccaggcatggaagtggcttcacaggtggccccggccctccacctcccagtgcaggccctggtgccatgagtcctccagggagggcagacagttcctcactcactggacttagcctcctggctcaggagacgtcacctccaaatcctgggagtgctgtgtcctcttggatctttattgcctctttcctcttttttttttttttttttaaagatggagtcttgctctactgcccaggctggagtgcagtcgcacaatctcggttcactgcaacctccccctcctgggttcaagcaattctcctgtctcagcctcccaagtagctgggattacaggcacccaacaccacacctggctattttttgtatttttagtagagacggggtttcaccatgttggccaggctggtcttgaactcttgagctcaagtgatccacccaccttggactcccaaagtgctgggattataggcgtgagccaccgcacctggccagttccctccttcctcctaatattccttctttccttcccaacttaggctgccagatttggctagtaagaatacaggatgcccagtaaaacttgagtttcagataagtagtccaacgagcctcatctttacttgattacaaatagggtctttacattgcgaagaccctgtttccaaagtaagcttgcataggtatcagggcttaggacttcaacatatcttttgggaggacacaattcaactcataacacctattgaaggaggtccttggaattgcctcagtttaccatcctggagagaggtgggagcgagcactgctgtgtgtacaggctgtaccctctcctctgcacaggtgtgttccccattcacccattttgcagaacatttccttacagtcctattaaaaatgatgtcatccctgtgcccccttgaggccacagcacctgctaaaggtgtttcattgttggattccattgactcaccaggccctcagttagagggccctttagggtcatcggctgggcccaggccaaagcagatgaatgggtggataatatctgagcacagaaatcactcaacccgccagcatcatctaccgagcaccactgtgtgtgccaggcactgggaattggtacaggcaaggcctctgccccgtgaagtccccacgctcctgggggaggggagagacataattcatttccagggtgatgagcactaccaagaggaagatatggggggcttcaggagctgggggcaagtggattgagcccactcaggcatcaggtatggcttctctcaaggaaggagcctttcaacagagctctgtaggatctaagggaactcagactgtaggatctaagggaactgccatggggaggagacttggagaaacagccctttcagggtactagagagggggatagtggagggctgcagcctagccaggtggtgtagagtctagggggccaagggtggatctatcacattcactcactaagcagatgctttaccagcacctaacagatgcggggtgcaggggaggtgctgggctcgtggcacagggagcctctagaatgtacaagagaggttcttaaaaccatcccaccccagcaattctgattccattggtggggagtggggcttggacactgggatgttttttaaagctcccaggtgattccaaggtgtagccaatggtgagaatcatggggtataaaaagggcacttagactcacctgaggaggcttcaactgagacttggaggaggagaggctggccaggtaagggagatgggagggcagggcggaagcaggagagggaacagcaggtgtggaggccttgccatggggaggaactacgaaccagctagctcaatggtaagcgggactgtggggactacgccaaagcattttaagctgggggtggcctggtcaggtcagtttcagagttgggtggtgagaggtgagggcagcctggactggggtgtgtcttagctgggactgacctgacagaacacaacaggctgggaggcttacacagacacttattttctcgcagttcttggggctggaggtccaatcttgaggtgccagtggggctgagttctggtgaggcctctctccttggcctgcagacagctgccttctcactgtgtgctcacaaagagctcattctctactgtctctttgttgtcttagaaggacaccagacctgttggattagggcttcacccatatgacctcatttaaccttatttacctcctcaaaagcctcatctccaaatacagtcacactggggttagggtggtgggtggttgctcgggtgagggagtcggacttctcacagccttgctgggagggtctacgtcagctaggccatttctccagaaaatgatcaagctactccccagggcggaaagcccctcattcttagaaccaggcttcaggcccaggtcccttgggagcagcaggcggcagcaccactaaccactgggtccagagacccatcaggtcagcagccggggtgctctgagagggtgggaccagttcctctcttttggttagtccagctggttgtccactctctcgagccctggggaagaggatttggcctaattcctccctctaccaccctcccctcccaaatccctgaggctaacccagtgcttggcccacagaaggcaccaatgaggtggttattagattgcttgcacttgtttagggcttactctagaccaggcagtgttccaagtgctttgcatgtcctgggttatctgtccctcacaactccctatgaggtgggtagtattacagatgaggaaactgagccaccacaggtgaactcactggccacatgtcacctgggattcaagcccaggcagcagggattcacctgggattcaagctcggatggggcggggtcactgcaggctgggaaggcagacagaacagtcaggacacatgctgagccctggagcctgggtcccctctccaggaacgaggggttgtgacatgagcacaactggagcagagccaggaggtagggcctgcagctctgctcacagccatgcggggcagaagagaggaccaagaagggtggcagctccactgtggctcagcctggctggctggactgtgccttaaagtgggctgagggggtcaaccctgcaccaagtccactgggagcggttgggggctccagggcccaggacctctgtagccagcttgaagccagacctccctggaactaacgaggtgactgggattagggctgcaggaagttcccctcactctcctgccacccctggttcaggtctggctctcacttcaaactccaagctctgactttggtatcaggctttgtcttaggctccatactggtgtggcctttgggtttaaaaaggagctagagtttctgaaaggcccaaacccagggtgcagaggtgctgaattatgagcctacttcctacagcctgcttgacagcaccaagcccacgggagcttgtggactctcggcccttgctttctagcccagctggcccctccagggagaaataccttttccagctctgccaccacttggccatggtttcagggttggctttcccagcttacccaggtcagcaggcagcccctgaccaaaaggtggactttgccaagctctggcagagcctgggccagaccctcagaccttggttctgcagttggggggctatgagcgtgggctctgaaggccatcagggctggaaggaacgtgggagagtatctgctccaaatactcccactagtgagccctcaagatgagaccattttttgaggtggggcagagacaaaggagacccactttgtatctctttacatctttgtaaagattgaacccagccccaggactgagttcaatttgtgtctactctcaaagtcacagagccagtgaatgacaggtgtgatacagtctccaaagacaagtaccatggatttattccctccctgggtgcaggccactattccactgagaggtgaagtttattcttcacctctttgaatctgggctaattctgtgactgctttgatgaatagatgcaaaaatgcatcacttgaggcagaagtgacattctgggactttttttttttagacgaagttttgctcttcttgtccaggatggagtgcaatggcgtgatctcggctcactgggttcaggcaattctcctgcctcagcctcctgagtagctgggattacaggcatccaccaccatgcccggctaattttttgtgtttttaatagagacagagtttctccatgttggccaggctagtctcaaacttctgacctcaggtgatccacctgcctcagcctcccaaagtgctgggattacaggtgagagccactgcgcccggcccattctgggacttctgagctctaaccttaagaagatcagcagcttctgcgtccttcctcttaaaatgcaccttcttggaaaacccagctgtgaggaatctcaaacagccacgtggagaactgaggccccagccaagactagcaggagagtgaggccatcccaaatccccagcaaccaccagatgaagcagaactgcctggtcaacccacagagccatggaaaacaataaagttgttattttaagatctaaatgttggggtagttgattagacacagcagtaggtacctgaaacaccagggcctccagtttcctctccaccaggcttcctctcagaagatcccccatcccagaaggaatccagcctggttgacagagcccagaccctgtctctaaataaatgaataaagccaggcgtggtggctcatgcctgtaatcccagcactttgggaggctgaggcgggcggatcacgaggtcaggagattgagaccagcctggccaacatggtgaaactccatctctatgaaaaatacaaaaattagctgggtatggtggtgggcacctgtagtcccagcttttcgggaggctgaggcaggagaatcgctcgaacctgggaggcggaggttgcagtgagccaagatcgtgccactgcactccagcctggcgacagagtgagaatcagtctcaaaaaataaataagaaataaatgaataaataagtggccacatattctccaaaaagtctcaagttgcattgactttccctcctattaacagcaccttaatttagaccttttctggtggctgtgaaatttgatcaaagggaaaagtgtcaggtgttactgtaccaaaggcagaagggtcaagctggcatttcattccgctgttcactttagcagtggataatgaatcttgctcaatgtataattaacacagggctgtagctaatggctaactctcccattttgtagatgaggaaacagactaaatggaggctgaagggacactgtacatggcctctgccaaagttaccctgcatcactaacttttgcctactccatacaaataaccagcagcccacaaacctagaatggaaaggtgtgtaagctgtatatggcctcctgtatcaatgaactattgcttctatgtaacaaaccaccctcaaatcctaaggcatacaatgatttattaccttcctgattctgtggtaggctggcagttcctctgctgggtgtgcctgggctcgatcttgcagctgcatccagctgaggcatcagctgagctggaaggtcccagatggctacctgacatgtctggcagacggtgctggctgttagctggaatgaccctcggggcctctcaaccttcagtagctagactgcctttcttccacagcattctcagggcaatttcctaagacagtggaggcagaagctgcctctcttggggccttaagcttcagaacttacataacatcacttttgccacattgttttagtcaaagcaagccccatggccagcctgtaccaaaaagtgggagaagagactccacctctaggtgggaaaagctgcaaagaatttgtgactgcatttaagctatcccacttatttatgagacggagtctggctctgttgcccaggctgcagtgcaatggtgtgatctcagctcactgcaaccttcacctcccaggttcaagcgattctcctgcctcagcctccagagcagctggaattacaggaacccacaaccacgcccagctaattttttgtatttttactagagatggggttt

SEQ ID NO: 1102 - DNA, 4935 bp, Homo sapiens
caggtggaaaaacttgtgaaatatttggatcccaacgacctggggagaatcaacttcaaggacttttgccggggggtgttcgccatgaaagggtgcgaggagctgctgaaggatgtgctgtcggtggagagcgcggggacgctgccgtgcgcgccagagatcccagactgcgtggagcagggcagcgaggtcacaggccccacctttgctgatggcgagctcatccccagggaacccggcttttttcccgaggacgaggaggaggctatgacgctggcgccacctgagggcccccaggagttgtacacagacagccccatggagagcactcagagcctggaggggtctgtcgggagtcctgccgagaaggacgggggacttgggggcctgtttctgccagaagacaagtccctggtccacactccatccatgacgacctcagacctttctacacactccaccacctcgctcatcagcaatgaggagcagtttgaagactatggggagggtgacgatgtggactgtgcccccagcagcccttgccccgatgatgagaccaggaccaacgtctactcggacctggggtcttcggtgtcttccagtgcggggcagacgcctaggaaaatgcggcacgtgtacaacagcgaattgctagatgtttactgctctcaatgctgcaagaaaatcaacctgctcaatgacttggaagcccgactgaaaaacctgaaggccaacagccccaaccgaaagatctccagcacggcctttggacggcagctcatgcacagcagcaacttcagcagcagcaatggcagcaccgaagacctgttccgggacagcattgactcttgcgacaatgacatcacagagaaggtaagcttcctggaaaagaaggtgacagagctggagaatgacagcctgaccaatggggacctgaagagcaagctgaagcaagagaacacacagctggtgcacagggtgcatgagctggaggagatggtgaaggatcaggagaccacggccgagcaggctctggaggaggaggcgcggcgccaccgcgaggcctacggcaagctggagagggagaaggctaccgaggtggagctgctcaatgccagggtgcagcagttggaggaagaaaatacagagcttagaacaacagtgactcggctcaagtctcaaacagagaaactggatgaggagcggcagcgcatgtctgaccgtctggaggacaccagcctgcggctcaaagatgagatggacctgtacaagcgcatgatggacaagctgcgacagaaccgccttgagttccagaaggagcgggaggcgacgcaggagctcatcgaggacttgcggaaggagctggagcacctgcagatgtacaagctggactgcgagcggccaggcaggggccgcagtgcctcctctggcctaggcgagttcaatgccagggcccgcgaggtggagctcgagcacgaggtcaagcggctcaagcaggagaattataagctgcgggatcagaacgacgacttgaatgggcagattttgagcctcagcctctacgaagcaaaaaacctctttgctgcccagactaaagcccagtctctggctgcggagatagacaccgcctcgcgcgatgagctaatggaagccctgaaggagcaggaggagatcaacttccggctgaggcagtacatggacaagattatcctcgccatcctggaccacaatccctccatcctcgagatcaaacactaaggcacggggctggctgcagagcagccttaggaccctgggaccaagggcagaccctgcccaaggatgcaggcctaagccgggcctcacactcacactgtaaatgtctctctggccaccatgcgttacgtgtacccgtgtatatgtggggaggctgtgcacacgagcgaggggtgagtggccgtggctgtgggcagcatccacacggttagccgtgcatgcactttgtggcccctttgcaaggggcagagggtactggaagtgggaggaggcaaggtctgctatcaggagttactgtaaaaacaagaactggaagctcgtgtttccggtactgggtaaaatgattctacctctggggataaggattcacattcgctctagtacgatgggctctttcaccccactcctagtccccttgggagtgggagcaaaattgtgatctttcctaggagtttgaatgccccatatttgtgtcctcgccagctctttggccacctttcaagccccagtgttcaagctcagagaggatgaaggggcatctggagggtccatgagatggggccctcaccaaatgccttggccaccggccagcagccctctgtgatgtgtgtgcagagtgaacagaggactcaggtttcatagcagctagtgcggggcatcctcatcctgtacctatagagttcgtgcactcccccatccatgctacctacctccccgtttctgtttcagttttaagacaatgaagcagcattcactgcgtcattgtaacatgaagggataaaaatgaaggagaaggagggtttgggatgggtgtctaaggcaggagttgacatcgggcaaccaaagaaatgagttttggggaggaacacaactcccatcccagtcagtttccttcccatggctgcatcttaagatggatgcacggagaaaccgtctgcctggctccctgtcttcattctccacgcagcctggtgatggcaggcctgggtttggatttcagaatcctagctccgggctccactcgtgtggcagcaagactgcttcgttccagcgtttagaaacacacctgtatttgattctcagccaggggagcactcgctgcactggtgggaggcggttgggaaagttgcaggaaaaccttagtcttccatccttctgacccatggtggaaattcacaccatggatttttaatggatctttgttctaggcagctgggaatagacatggtacttaccttagagttttccaatttatctcaattttatatggcttgtgattcattttcttaatccaaatatatataaacgtgtgtggtcttattcttccccctgcagtttcttgctttcttcagcacatcttatagtatgagaaggaaggtttgggcatgttgggaagggcggtggagggggagttgcagaaagagagggcagtgagggtgaggagaggggatctggggacttgggtgtgacacctgcttgacagaggcagggctgtggccaggaccaaccttcaattccattccaatcagcctttgcatttgttggatctcgtggcttctttttaatcttttgttggggattagtttcatgctgcacataatggggttgcactggtctgacccaggactttggagccacccacactgggaagactaggctaggcagtcggtcttctaggagtttctcagccccttaggacgcgggtctccttgggctcccccaagggttctgcgaagaggcagtggaagaaggcatgaggagagggtctcttgagaatttgccaataggaaggagtggccacggctgaaaggaacaagacagatcctgacatagctttggcctgggtgttaggtcagaaggagtactggtgcgtgggggccttaccccagggttgagtattttatctgtaaaatgttatctgccctttggctgcattggaatttcagagaaggctgcagaggcctgggttacacagcctgagtcacaacgtgggaaggaatctctgccacgggaaaggtgggcggaagcagctggcagcctggggcgtgcttcaggctcctccctctaaggggcgccatgggaacaggctccggagggagccggcgtctgaaaggcccccgggacctgctgcagtgccagaggggcctctggagcaggcctggcttttaaatggggggctgaattccagctcacacacacctcaagtccaaccttactttcttcagccagaatacatttcttgtaaaacctggcttgttgcttggcttttaaagatggtgtatgtttgtaaaaatattcttctgggctcaaaagctagcttgagggggcagatgccccaggtgtcccagctccacagcccctggcagatcccagaccccttggtggcaggtcccagagcctaggtggtaggagcttgatctttgtttctgcccttacccctcagtagtggggctgcgaggtagtagacaggatgcccagttaagtttgaatttcagatagaaaataattttagaataaatatgttctatctaatacatgggacagatgttatttttagagataggatcttgctctgttgcccaggctggagtgtagtggtatgatcatagctcaccacaaccttgaactcccaggctcaagcgatcctcccgccttaactgcctgagtagctgggactacaggcatgcaccaccacgcccagctaatttttcttattttttgtagagacagggtctcactgtgttgcctcactcgagctgctgacctcaagtgatcctcccacctcagcctgccaaagcactgggattacaggcatgagccaccatgcctggccaggacatatttgaaatggggagattttaaaaattctgatgattagactgaatcctcagacgttctggtttgattgttgtgggtgtagcccaggcatgggattttttaaagagctgctcaggtaattccaatttaattgcgtgtcctacttgggttttttgtttgtttttattgtttttgctaaacctggcaaccctaccgagtagggattagcagtaacttatctgaaatttagaggtgttttgggggtggggcgagggtttctgtagtagactcagattttacatggccctgagctgcccttgcgttcagttggaagccacgcaaaatgaactgaaccaggagtga

SEQ ID NO: 1103 - protein, 555 aa, Homo sapiens
MKGCEELLKDVLSVESAGTLPCAPEIPDCVEQGSEVTGPTFADGELIPREPGFFPEDEEEAMTLAPPEGPQELYTDSPMESTQSLEGSVGSPAEKDGGLGGLFLPEDKSLVHTPSMTTSDLSTHSTTSLISNEEQFEDYGEGDDVDCAPSSPCPDDETRTNVYSDLGSSVSSSAGQTPRKMRHVYNSELLDVYCSQCCKKINLLNDLEARLKNLKANSPNRKISSTAFGRQLMHSSNFSSSNGSTEDLFRDSIDSCDNDITEKVSFLEKKVTELENDSLTNGDLKSKLKQENTQLVHRVHELEEMVKDQETTAEQALEEEARRHREAYGKLEREKATEVELLNARVQQLEEENTELRTTVTRLKSQTEKLDEERQRMSDRLEDTSLRLKDEMDLYKRMMDKLRQNRLEFQKEREATQELIEDLRKELEHLQMYKLDCERPGRGRSASSGLGEFNARAREVELEHEVKRLKQENYKLRDQNDDLNGQILSLSLYEAKNLFAAQTKAQSLAAEIDTASRDELMEALKEQEEINFRLRQYMDKIILAILDHNPSIIKH

SEQ ID NO: 1104 - DNA, 185033 bp, Mus musculus
  misc_feature (1)...(185033): n = A, C, G or T/U
caggttcatattcctgccattgttatgagcttgggctgatatgctgcttgcacaaaaggtactcacatgatggtcaagaattctccacatttggggctggggatgtaggctggggtagactgcttgcttggcacgtttgaggccttgggctcaatccctaacactggggaaacaaagtaattttttgtattttcctagaaaccaaagagtattgtattatttatattccttctaataacatttggataatctgtattctattcaggagcacaatttacaaatatttgcataagagcttagatttggggggtgtcttatgattttattcaatgattttactaagttaaatgttaacttgccaatctctggggaagacattaacatttgttaaattataacttctggtagataaatatcaggtaaattattgtgtgatactcaggtttaatgtacctctcttaattaaagagtctgataagtgtattgaaagaacacaaaagcttttatattcaatagaaaatttaccttttaggagtgttgaaccttttgacatcacaggactgtgttgtcaactataaagttcaagatcaagagccatggagaaccacacgatcgaagtacaaaatggtcacacacaaagaattgtaatagtttaagcataattttactttggacagcattcatagctaccctggagtgtgtgtggatatatctggcttgtggactgcaggatgggtgcacctgcaaggcttaacatgtagtggatcctcattaccttcccaaagtgggtttgcttgttgctagaggcagcttgtgacactgcaggcttactttatcatcattgtgggcatatgatgttatgtaggggcatgtgcatgccacagcatgtctgtggagatcagaggacaactttgtggagctgggtttcttttcctctatctgtgtgtgttctaggaatcaaacttgctcaagagtttgattgcaagggcttgtatctgctatgacatctcaatatccctcaggtttcacacacacacacacacacacacacacacacacacacacacacacacgaagtatacgtacatatatattttttcctgattctccagcttatcatatgtggtgccatccttggacagatgtttgagagttgtaaaacaaaagcacattgggagagccccgtgaagcaatataataagcagtggtcctctatggctcctcattcagttcctgtttctagagttctgacttgatttcctgttctgatttgacttagtgatagattgtgaccttgaagctgtaagataaataaaccttttcctcctctaaactgctttcagttgttgtattttgtcacatctataggaagtgactaagacatacatacttttctttaactgtttcgactagtctaatggatgaatgttttcctagaagggatgttttagcagtttctcaatacagttctacgcagtcttgagaaaagtactttagcttcttaaagtgttaaacaccttacaaagtattaatgagttttctaatattaaagtgactgttcattcttaaaataagtatagtattcattatttcatttcaaagtataagaagaaacgtggcctgtagatttttcctctagtttttgaaaatacatgtgtgaatatacagctttgttaaattttcttctaaagatattaagagttttgttaccatcaactagttcatgatactatacagagaaataagtatggttcaaaatgtatgatgcatttttattacaaacatgataaccatgtcatgaaatttgaatcatagaaagtggatttctataaggagaaaatagtttgattttatggaacttagtatttttcaaaactcttttattttgttattatagacatcaatagtactactacaattagatgctcagaattcctcgctgatagataatagtttggatttaggtttgtatatttttatcgactgtgatattgttataaatatactagtgataaactttaaaatgcataaggtattcacacatttgaagggcacatctaaaataggtaaagagccggttctctggcgcaccctctaacctgttcagactaatttcctaggtcccgcggagtcccggaacccagatggcgaccgctgctgctgaggctgaggccgcctcccaagccaggcggacacctgtcctctggtccggacggtggccggctgtctgcggcccgccaagggtgctgcctcagcggctctgtgcttctgcctgtcccagaataccgaatggcagagaagcacctgaaaaaatgttcaacatccttaatcatcagggaaatgcaaatcaaaacaaccctgagattccacctcacaccagtcagaatggctaagatcaaaaattcaggtgacagcagatgctggcgaggatgtggagaaagaggaacactcctccattgttggtgggattgcaggcttgtgcaaccactctggaaatccgtctggcggttcctcagaaaattggacatagtactaccggaggatccagcaatacctctcctgggcatatatccagaagatgccccaactggtaagaaggacacatgctccactatgttcatagcagccttatttataatagccagaagctgaaaagaacccagatgcccctcaacagaggaatggatacagaaaatgtggtacatctacacaatggagtactactcagctattaaaaagaatgaatttatgaaattcctagccaaatggatggacctggagggcatcatcctgagtgaggttacacattcacaaaggaactcacacaatatgtactcactgataagtggatattagccccaaacctaggatacccaagatataagatataatttgctaaacacatgaaactcaagaagaatgaagactgaagtgtggacactatgcccctccttagatttgggaacaaaacacccatggaaggagttacagagacaaagtttggagctgagatgaaaggatggaccatgtagagactgccatatccagggatccaccccataatcagcatccaaacgctgacaccattgcatacactagcaagattttattgaaaggacccagatgtagctgtctcttgtgagactatgccgggacctagcaaacaccagaagtggatgctcacagtcagctaatggatggatcacagggctcccaatggaggagctagagaaagtacccaaggagctaaagggatctgcaaccctataggtggatcaacattatgaactaaccagtaccccggagctcttgactctagctgcatatgtatcaaaagatggcctagtcggccatcactggaaagagaggtccattggacacgcaaactttatatgccccagaacaggggaacgccagggccaaaaaagggggagtgggcgggtaggggagtgggggtgggtgggtatgggggacttttggtatagcattggaaatgtaaatgagctaaatacctaattaaaaaaaattaaaaaaaaataggtaaagagaagtcacagaattgcctacctttctagataaatctggcaagaagagatgtcctactatctattctcacagtcatctaaatcttatttttaacttttcaaaatttaaattaacatttaaattaatattcaaattgtaaatatttaaaattaaaatataattaaatcagtttttccctgtcttttctcctgtcctcactccaaccatctcccatgactccccactaactctcaagttgatggcctctttattttaacattgctctatctatctatctatctatctatctatcgatacatgcatacattatataaaaacaatatgctaagtccatttattgtgtcttttatgtactgaataatcagtttggggaccatccctggcctaggtcaattctctctaagtggtcatttgctgcctggacttttttgcctaggattaggaattgatatgcccctttctttgttagtatttcaattgttatcatcttgggtcatatttaggcagttattttgttgagttattcaacacagacgtgtcccatttcttcttgctagaaacgcatacattttaaatctagtggttttgaactgaatgtaaaacacatatgcaggtatgcgagcagaattgccttcactagcaagacattgctgtcagttcttttagtctaccctagattaaagcttggcataattaaagaggtaaattacctcttttatgattagaattgtttaaaaccccaacccaccaaagaaaaagcaaagagaggaagaagaagtgaacaggaagaccactcctctgcctatgcactgccctcccctcctcctgtgcactgccctcccctcctcctatgcactgccctcccctcctcctatgcactgccctcccctcctcctatgcactgccctcccctcctcctatgcactgccctcccctcctcctatgcactgccctcccctcctcctatgcactgccctcccctcctcctatgcactgccctcccctcctcctatgcactgccctcccctcctcctgtgcactgccctctcctcctcctatgcactgccctccactcctcctgtgcactgccctcctttttctggtcatcttgaaagagggattggatgcagggaagtgctgcctggggtgcaatcacattctctcaaaccccgtttttcaaacttcagagttttctcatgatgtgttaattttgtggtacaccaacatttatgaacattttttagttcaaactcaatttatcttagttgtaccggcagctcttgcctggcattctgcccagagcactgattgcaagcaaggtctgcagaaggggtgcagcagctttaaaagactccgatatggtggtccaacaaggatgcagaatctccgcctctgttttgactttccaatctgcattataaaaatgtaccgtttagcagctggaggtatggcatttgaataaccacttgtaattatgtgaatagcttgcctgttaaaatcaacccatgatataaactagagtccatctctcacttgtttgtttgtttgtgatcatgattgtaaacaaacagtggggctagatgggtgttgttttctgggaatccaacccagagctctgcatatgctaggcaaacaccatactccactgccactctctacttgcagcactaactttagaaagataacttgcacagaaatgaattatttatttatttttaaaggatgtaatgtggaactctggtacagagtggacatatgtgctttctgtcttcagctaggactttgatgagttaccgagaggtcccagttaaaagtaaatgaccatgaaattcatgatgattaatttatatcattctacagatgaaattgtgactttttccccccatttcctggcttgttttttcttttgtgcatttgcacttgccaccaaagaagcaattcaggttttcagacattaattaggggagactcttgttcacttggaattaggctaactatgtaaaccaaaatacatacgatgaaggtcacgttgatagactggagagagggctaccaaggatctgagagcaaggagttaggggtcacaagtaccctctaggattgaaacttcatgagtggttgtgtgttaggcatgactcagatatctaactgaagaaagataagaaaggatcataatttactatgtccttcagctgtgcacatctcagactagcgtttgaaatcctttaccattgacttacgtgcaagccaagtatcacaggaatctgggaggacatcttatgctcagctgcttagttatcaccaatttatggcttgaaccaggccaagggagaaggtaaataaggccctcttctgtttaaagggggatgacaactcttttgtaatatttaatttgaagctagaaatacagactctttctacactgtcacacacttagctctgcaggtaacagcaaacccagcaggtaattgatttgatgcttgctacaattgctttagaattgcttcattcaaaactttagtctacctctggattctgtggctttgtcttgcttcctgagcctgctctgtccttagatctgtttcctttatgctataaaaacatggagacttacacgcttcttcacttatattctcaaaagagatgaagttctgtccaacaactctatatgagtgattgccaaagtagtccatatgattccaggaagcagtactctaataaacccaggaatgggacatcaccccaccccaccccaaccccagcagctgtggcacggaggttgccgtacctcgttctagcttctgtcagtcagggcacacctggactgagcattcttaccttaagaatgctcacctagagacaagaacagaatggcacaagaaccaaatgcatactcagacaagaatgactagatcttctgtacgggagtcctttaccatccaactactgttctgttaactggcatattatttctctgcctactcaacttcatgggggcaaagtaatgagcaagcctgggtattccaggttttggccagtagaaattttagcccttgtaataaacctagctcagtttggggcttttcacagtggttctatgccatggtaataaaacaaaagagtccccccctcccacataccccaatataaagctaaaagtcctacccaaactttcatttttagactcacttgggaaatatcacatgaacttcattcacgagaaggctcatgaataataaaccctttcagagattctcatcttacacgggagttatattacatacattttgttgtgatccttgccatttctgcggataactccggcagcatctgggccaccatggtcataagcagaacttggtaactccatgctagtgtctttagatggatgactagtgtgtggagacaaagtgaggtgccacctatgaaccagaaagcacacacatcacacattagatctgctttgcatcatgatctttgacttcccagccttcagagttgtgagaaataacatgtcatctataagtcacccagggctgtgttgcagcttccagatgggacttggagtattttagtattccatgggcttccttaccagatgtatctccatactccacctctttaaacagctccagaacttggggccatcttcagttcctgattttccctgcccctgtactgactttgctacctacagtattccaagaaactttatccccttcatgaccacctcattcataattcattacagctacttcctatctaccttggttaccttttacccacacacctctgctgatgtaataccctcaaccttgaagaacaaatcctgaagttttctattgccttcagaatagaactctagtctttctgtggagtttgcaaaactcttccttatcttgtctcctctgaaaaatagacagtcctatttttccagtgtgatttcacattataccacctgccctcagtgtaatatctatattgagggttttgcagaatttctgattaaaatgtccttgattaccaagtggtggaatgcagtagatccagaaacaaaattaacttggactgtctttagtttccttaatagccatttatgcccatgttcatatgtgatctaacattcccttttgctatcaggtgacatctttggaatgtatttacttagcagaataccagaatccactaaagctaagaaagccataacatctggaatatataggcagagacttctctgctgagatgtagcctgtctagctcacgtcttcaacaatgtttgaaagtggatttatttgactttattttgtcctgtgacaatgaaaaggttataccatctcatccttggtggaacacatcattttactgtagtttgagttactgttcccaggccacaattacttatatttggatagcaataaagtatcccttatttttttcttgaatggaggctgtgttttacattgacagctgtcacagcctgtctccactatcatctttgctttcactatatctgcctacaaattgtatctatcctacagctccaggtaagtgaaaacattaagttcacgtccttccgtccttccttccttctcttttctttctctccttctttgctctgtctgttctttgtttggagcatagtcctctttcttagctggatttgatcctattgattccttagggcttgtcttgagctttctttctaatgagcaacacttcctggttagccaggttgagaggagcactcagcgcctctaatttggctaggccccatttctgatttgattggatctttctctacatttgctctttttgagggtgggagccatacttctcgtctcaggtactatgggtttgtagtcatatgcacaacaaatgtctagagcagtgtcagctggcttgtagaagcacttcgatgagtaatcaagatcaagatttgttctccagaagtgagacacagaagatatgaaagacctcccttcttgcagaagggagtgtaacatggtgtagaagaggaccaaagctcctaaagggtagaactagcacgtgactcaggaattatagtctatgtccaatatctatccacaaagcttctagaagactgttccacagaagtacttcatgtaagtggactcaccaaaaccattatgctaagtgggtcagatcaggccacaaaagggtcacacttttgtatgtaattagacatatcttgaggaagtggattaatgttgcctagggcaggtgtgatgtgtgaagagatggaggaagggaataactgctgaggagcatggaatctcctttgacagctggaaagaataaagttgatgtggtgatgggtgcttacatgtaagcatgttaaacatttaaagataaaattaccaattactttgtggggtttctgaggtgagattctgatgaccgatacacagtgatctgaaactagagtggtggcagtagggataaacggtcattttgttgggtcagatgtttcgatggaaacccaaaggcattaaaatttcaagcacaaagagaaaagataaggtgacacatagatattgactatcagtttatgaaatgcttattgaatgtatttccactttcttgactactagactagatgtaaaggagaaatgggaaacagcttgctgagtatacaaagaagtggtccttgacttggtgctcaactggaaattaaaaaagtatatgtgtgtaaggaagcatcaaatttctataagagaaatacaacttatttgtgcaaagaatgggcaggatggaaaaggtcagaagaggtgacctgctcagtattagttgttcactaaggacttcaagttgcccagctcagtgaaggcatgtcaagatcctgttgatacttcccactcagtacagagattaaagatagttcagtcaattttgttcagtggaaggaagagaaaagcaattcccaataatgctctctgtgtgaagattagaagttgtccacagactcacattcaaacgatcagggcactaggcagtaaaatatcttggatatatttggttcattcccagattgttaccacttgactagttccaagtaaatggtatacgttcaataaaaattaagtgaatgttgtctaaaccatctgagaagtgtgctacctgttgaccatttctatgtaacagtcacgacagtctacacaattactctccccttcaaacaaaaacctaccaagtgtatggcatattcccttcaggaaaagatgttgactgacagctttgctgtaaggatgtggaacagctaaaaaacaactgtttttagtggaatatgaacgaactgctatgagagagttgattacaagtgctacagtcctagcgctgaagatctttaaaatccagtggtttagagaagctttcagcttgggcacgttcaggaacttgagagttccgctaagccgataggtccagacatcacgtcaaacatttcttgagcatgtcatagtgccgggtgctttattcagttctcacattttggttgtttgtaagaggcaaaggctcttctcgtggtagattcgagttctggacagaagaaaaattcagatttggtaggtggttttatgggcctgtcactaagagattgagaacctttactaggaggtagatcttgagaaaggttaggaaaagcgttaagtcgaagccaatctatagcagagtcaattacctgagaatcactcaactaggaggttcttcttgtggcctagccagctgaatctctgttaggaggaatatctgttgaatagtttgttttggctcaggacaaaagataaagacatgatgtagtttttgaggatggtcaggccagtgtatatcaggtcaatccacttcacaggtcaggtctctcttcagatgaggctcagctggcctcctcttggggggtcatgtgatgcgcccgctgatgcctggagcgccgcgcgcaggcctgggcgggcctaggtagaaatcaacttccggtgaggatgtcctggacgccgggtggtgtgtgggctgcccgaacgtgggttcctgggccagcagtcaccgggaggggggtggttgcgtagccggtgtcccggagccagtgtctgagagccgggtgtgacgcgcaacagcgcggggagcactgcggtgggcgcaggtaatcgggtgctcgccgtctgggtccgggtctcggccgcgggtgggaacgtgaccaagttactgcgagtcgcgaggccgcggccgggcgactcacgggacctgggtcagggagacacctcgctcccgccctcgcccgcggggccctgcacttgggtagtcccgagtggagagccatagtaagtccgcttgttgtccgcgctgtagttgccccggcggaacggaagtgttgaccctgatgcggttcccgtcggtgccgagcggctcaccccttccggtctcagaccttgggaaagcgcgcactgtgcactcggagttctggagagctgatcgctggacacaccctcagcggcgtctcgggttctcaccccaggcgagcaccgtgcggagcgcttggcctctgtctgttacacacctttccccgcccccccaggatgccgcgtctgcgcggctgcctccgcaggagggagctttgcacaagagttgtcagctgctctgacagctctgggatggtgaggccgccgtgatcttggccctccgctctggggaagtgaaggctttgggctcagcttaggtccctcagaggccgcccacgaattccgacttatccctccactgtgcagacactgacacgtcttcgcccctagttttaaacttcccggctctgtggaaggctatggaacatgtttgcatgctacggtggttgagggattgccatcttgtcacagggtgggtcagctgtcacctcaggatttaagacaaaagcctgcagagtactcacagtttcctgggcgacagaaaccgaggagaagtgcacttgtagtcatcttagccacaccttgtgttgcttttggggttgtttgaacctcacctgttgggataaatggctcaggaagatgctaggtccgctgcaccttggtgccactatgtggtgtgttaatgtgtgaagaattgcctggtgagaggtgaggaagtttggtgtctcctaggatgtctagagatgtttcagtgggctgggaactgtgaactggttgcctagcaacaccatactccaaattggaaaaaaacataaaacaaaatgagaaagtccaggatttttgagtttttaagaaaaatattaatcatcataatacttcacagaaaaagaaaactttaggaaatcacctagagaagcatccattgtttgttctctctctctctctctctctctctctctctctggggtgtgtgtgtgtgtgagagagaaagagcctgtcatcaattgggacattttattgaacacccaggtactatcagatttgtaaagaatataggatttttattaataaaggaaactttgaagggaatctctctctatgacacaagccaagtgggaatcaattaaggtgggtgagatctttctattaatgaaaaaggaggaaaaatgtttaagttctaaggatcacaatcacagtgccctgctggctactgtttccgtataacttaccattaagtgttgtctttcctgtaggatgtaaacgtttgaaaggccactctgtattaatgtgcatgttaacttggtacagtttagggttcgggttctggttgtctcctttcttcagtttccaataacttgggtttagtttatttgaactagagttgatgtaccttttcttgaaggacatttcttagagtttagttcagggtaaactaattcagtatgtcttcgtgtgcactcactcttacaagtgtgcctggtcatataacatcaccacggtttgctcattgggatcccccaggatggctacagattcatcctctgttgggtttttcctctctggagtcatgtaagtggaaagatgaagcacagtcccttgttcgtactttttttccccccagaatgcttttctagcccttttggtgtctccgtaaaaaggggacatggtacttctgtctgtgagtaggccacagtgtactcactcactcactagttggtggacatttaggagtttctgagttttgtgttttgggatgaagctgttaataaaaatgcattttggggggacagtcatatttaagtctttagagagaaaagttctcattttctttggttcagtgttgagaagcagggtgctggaccaggtggcagctgcatgggtaacgttttagctctgctgtttaccctggtggctgctgtgtgctgcagtcctgccagtgagatgcatggttcatgttgccatgtgtcagttaggcattttagctcctgctttagctacttccgaaggagtttcctcatgagtcattgagttttcgttttttaaatttgaggttctcaaatagcccactctgccttcaactggctccgtagttgaagctagccttgaactcctgatcatcctgctgtcacctcctgaggctgggattacagctgtgtgcctccatgccgggatctcacagatgattttgagattctagttaactaacttgtaagacattttcctgtgctgttgttgctgtttgtatgttctttcaagaggcatccctccaaagtgttttgtgagtttttaattgtctaattaaaaaaatcctatacaatctgggcacaaactttagttttacatatacatatgtatgtgtgtgtgtgtgtgtgtgataatatatatatatatatatatatatatatgcaatgtgtatgtatgtccacaagtgttttctttgagtctgccacttgcttcttttcctgacacgtgaaatgtgtgagtgaaatttcagttttgatgaaatccattggatcagttctttttcctttttttaaaaaattaatttgtacactgtccaaggttgcaaagaatttctgtttttctctagaccttttctagttttagatattgtgtttaggatatgctgtcagttactcttcctttataatgtaaggtgtaggctgtggctttctttgagcctttcctttacagatgcatgaatttggctgcatctgagggaaactttcttactgtccttgagcaggattcttgttggcactttgtgagaaggcaattcactgtgtacgtgtggctctgtctctttctggcattctcttctgtttcatcattctgtgcatctctagttttatagaatgtcttaaagtcagaaggcttcattctctagcttggttacttttcaaattgtttcaaatgttgtagcttcttttcttcctgtataactcttagaggcagcctgctttctctattgtaggggtttggttaggagtgcgttgaagttatacatccctttggggtggctggcatcttaggtgtctttaatctgctaggtgattctgtttatgcaggatttaggtttctcttaatgtttttcagctttcagcataaaaatcttatttctgttttgtttcatttgtatgtgtgttcatttgctgctactgtaaatgatatccacacacatgtacatttctaattattgctactgttataactattgaggtttacatgctcttgaaccctacagtgttgttcaactcacttgttagtacatgtgacctttatggactccttgtgattgtctacgtatgcacgtatccatccacagaggctgtttaattttgtatttcccaactgtttgcattttattatctcattgcactgctaagacttctagttatgctgaataagaagtctcagaagacattcgtgactggtaattttctttaaagaaaacatgtagtctattttttcttttatcattttgatcagattgaggaaattatctttgactcctcgtttgtttagaacttttacaattcaatcataaacagttgttgtattgcttcgtctctttgtagaaatcattgttagttatggtaaaaaattaccctactgttattctgagaaggctgctgcttacattttggtgctctccatattgtttttcattgtgaagattattaagcaaaattataaatactttatattttaatccctttttttgaagtcttgcattttgagtaatttaatttactagggcgattttgtaccttgtttgcaatgtcattctttacacacgtttcattgtcagtacagttataaatcattgttattctctcattataaatcactgtcactaagttataaatcattgtcggtactattataaattactccactggaaataacttgaagtctgtcttccctctttattaaaatgaaatttccttgagttctttgagagtgggtctataaaaatgttcaagttgccagttttgatggtgttctctagtaaatccagggtgtgtctttttgctgattgcttcccttcccgtctatctgtatacactgtactctttgttgatcattgtttgtctcagcttttttttttttttgaaactggacatataaaaatatattatgtgttctctctgagtgtttgctcatttctcttccttggaatttggtcttgttgctgtttgtttgcataataatcttgttcttgatataccatggaagctctgtgtcctcatgtgcagccactgaagtctgtttagattacgagccacacacaatcatttccattgaggtgtagagctaatgcatctagcctctgccaaggatccctgagtgatggtgcagggtagtaatgctcatgtgagcagactgtaactgccttagtcttcatttgtcacttgtgcagagccagagaaaaagtctctctctctctctctctctctctctctctctcacacacacacacacacacacacacacacacacacacacacgacctgtagcatgcatacacagctttatgaataaacttggtcttttagattttcagaaaagtgttggatcttttaagaataatttgtaaacatgctactcttccagttcttacctttgtatgttagctaggcctgtgtgcatgcagctgtcaccaccggggaaaggttgctgtcctggcaacctgagtgagagcaaatgcaggtaagcacaggagcagcatttccaaggagcagccgggcaggtcaagagtggcagcttctgaggatgggcctttggaagagttcctggtgggtcccaggctgctggggttccctgtgctatgaacctgctgttttctcaggttatgagtgctggggagaaagtgtgagggtaggagggctatgaacctgctgttttctcaggttatgagtgctggggagaaagcgtgagggtaggagggcccgcagtgtcagagcctctgttctgactgtcagtgctgatttttggacataagcgtcctgggttattgcaagccttggattggtgccgggtcatgagcttgttgactggcagttgttctaaagcctggaatcagctccctccttagcagggcactgcagagcagtgagggggctctatgtggaaagactcaatggagtgggaagcagatctggtgaggtgagacagacacactgctcactgtaataaactatgtgtcctcttcaagactgtcactagctagtatgtgacactgtttctgtgtagccatgtttgctcacacagatgttaccacagttttaggtttgtgaattacaactggattgccagagtcattttgctcaaagggaaagtggaaaacaaaacaagccatttattgcattgtgtcctatgactgaacgtattgcttaggggaaattgagttttctgcataaggaattccccagtaaaagacagccagagcccatttctcccttgattgggtgaaaatatctagatgtgtttttgtatattttcatgatttagttgctgaaggtaactgattttttttcccatttgatagatagaatgttactgtgttgtagtagtatctgagtgtcataatagagcatatacaggtatattgttacagaaggaattcctgtctatagacccttgatatgatgggtctgtccagtgagcttctctgtaccttttgtgtggtttagtctgtatcatctttataactgaggaagattgaatggtttgcagatgtaataaagagataggctttcatttcacattggcttgtgctgacattcatttccttatttatagaactccttggaagcagggccataagctgagagttccacatccttgttaggtaggtccagggtgtgactttctggttccttcagtcatgtgtagtttggggctaggtttttacttgttggttactatggcaatgctggtatagttatttaaggttcagtataaaatataaaacaccaactgaagatttacacacaatttgaagaatttaggaaggaaaggaacttgagcaaataaaaatgaatgtccttcctgtctcccagaaagtaacattgcttgagtttaattaaattaattgactcagtagagaagcaaggccaggtggcactcctataggacactgctgaccttatagcacacgaacagcactatgggagtacctggcttctccgtgggaaagcttggtttgccaaggtgtcactgtgatgaagaaaaaccatgcccagctactgcccaaaagggttttgagtcgccagagttaaggcatgaaggcatgtttctgaaaaggactttttaatgtaacatgagagaattgtgttctactggatgagtttagtttacatatgatagaagctttattagaattggtgctcaattacttactaggtgtggaggtaaaaaattataggtgattcatgttaaagtcagaatcacatgaaaagtatgtgctgagaattctggtatttttaattcaagggaaatgaaaattagtggttagaataagttttatatcatcttggaaaaatgtgagcaggcaagtactttatgtgtttctcttggtgaacaagtctgttttcttttaaagagacactgtttgcaggtcagacctttgataggtgcacaaagtaggatctgcgaactcttagtctgaaaattaagaagccagaagcgagaggtgtggggggatgcatagctgagatctgcagggtctgtggtgtgttcacctagggttcagttgagatctgctccctcagatcttccaggacatcagtcaggaaggtgagagaagtttaagtacttcacagtagagtactgattgtgaaggaatggggtcggggcagttggactggaatctagagacatactaccctgaatagattacatctgaaagttggaaccaggagatgataggacaaagcctcgatgaaggataggaccacaccctgaattgagatgaatgaccactctatgtccatcctgagaaattagtttgtgtgcccttgaggaaactgcagtaggtatgctggctactcactctgtttctataggtggttggctagaagcctcattcagcccatgaaggtgaaacacaaagtgtgccctgtgaggacatgctgtgttctgtgagttttatcactgacacagacagaaattgtaggcatgagtgatagaatcgacagccacagtatatatagcctgacagtggaaagaaaggtcagactgaattcattgatgtgggtacattaaaccagtattctgaagtttttcagtttggggacttacgaagaactatgatacttcatcccaagcatggccccaaatgcagtttacagagcaggttggaaatgctggacctgctatggtctggtggccaagttggaatctgtaggcttagggagacataaaagtgagtctgtgtgccatttaaggttactccccgaggttgggagtggtagagcataccagtcatcccagtgttgggaggatcaaaagttgagccatcctagtctatagacagagttaaaggccagccggagctacatgaaattctgccttaagaagagctgggatacatctttagaggagccctgatatcccgaaagaactctagattctgtacttgggtggaagaccttacagtgggaatggcagccactgaattgaggaaccttaacacagcactcagtgtctaaggatgagatgggcggagctaccaggatatgcagcagaaccaaacagaccagtctggcttctgcagacccagagcttattgattatgatattcccatcagtgaaacagaattgatcttcataagcagaaaggttaaggtgagataaaatctaattctgttcagtcatcctaatagagatggatgctaggtatgttttggcactgtggacgtccactcactaaggagtgctatggatttgtactcattaaggctgatctgcatgtgggcactgctgaatgtacagtttgccagcaggactcactgatatgcaggtgctgatacagtgctattccctaggatgatcacccagctccccagccgcaggttgattctgttggtccccctgtgttatggaaagagcagacttttgttcttatccggaggatgttggcatggatgttccttcctatatgcagttttgtggagactactgcctttgggtcacagaagtccttaaccacttctgtaacattctaaacaagagttgcttctgatcattcgacctgtttcatggtaaatctggtcaaataactcatgactacaggagtatggcagtggtcccaagcctatggggttcaccaactttactgtcttccatggtatttaaagttagatggcttggtagaatgtttgcatggtcttttgaagactcagttacaataccaggttggtggttgaaccttgaagggcccagacaggagtccccaggagttagggttagagttaaccccaaccctttctatcagcacctagtgtgtggtactgttcctccccttgtgaggattcacaggatccaagaaccaaaaatggaaatgagggtggttattattttagtgacttccagaaggcttctgtttcctgtccccatgatcttatccttactgatctagagatctgagttccagagagaggaacattgccaccagaagacaaaaggtgattttgctgaacagctaaggcttcctcctggtcccttcagacttctgcctttgaatcagccagcaaaggagagagacgaatgctatgaaggagagagagtgaactgctcttttgcagtggaggaacagggttcaggattcaggcagtcccttaggatagctcttcatactgtcatgctcagtggttaaggtttgcagaaactgggcctgttctggccttggaacttcagaaggattagggttatcctggtaggtaaatagtcatagccagttgaagcagttgctgatctccaaaggactatgggatgggtagtggagatggcagttgttgatacagactgtgagcatgtggccagacacacacaacagctacagttgcacatgcattttctgttgcctcatggtataacatgaaatattttcactttacttcatagcatctaagtctttttgttgccataatatttaagtgactggagcagctcaagcaccagaagaatgtacattgctcagggttttaccttctctttggggacaggagtgaatgtgcttcagggttctgtgcaagatggttgtatcgtgttgtgtgggaaacttgactatggcttaggagaatgcacacaagtgaaaggtggacagggttgtgccttcgacattcagggttacctgtgaagttgactgggtcttgtggtatcctgacacaaggcccaacattattctctgtgtgtctgagggtgatttttgaataacatcactgttgccttctctaataaggaagaagatcctgcatagtaaacaaactaaaatgcaagagtaagttgtatatggcaaccaatggactgctttgaaggaaagtactaggatactaatgctgtgtgctttatttagaagataataaaggatccaatgaaccatctgagagctcaaagtgcagaacaaannnnnnnnnnnnnnnnnnnnnnnnnnnnnnnnnnnnnnnnnnnnnnnnnnnnnnnnnnnnnnnnnnnnnnnnnnnnnnnnnnnnnnnnnnnnnnnnnnnnnnnnnnnnnnnnnnnnnnnnnnnnnnnnnnnnnnnnnnnnnnnnnnnnnnnnnnnnnnnnnnnnnnnnnnnnnnnnnnnnnnnnnnnnnnnnnnnntagtacaggcctgacacagtctgtatgatcctgagtctaagtctgaaaacagaccagaagagccataagtcagcagggattctgcatctcctcttgacataacactgactttcaatttggattctctactactactttctactctactttctgtttctctccctctctccctccctctctcctcctcctgccctccttttccttgtctagagtctctgacttctgggtctagtttgttctgcactttgagctctcagatggttcattggatcctttattatcttctaaataaagcacacagcattagtatcctagtactttccttcaaagcagtccattggttgccatatacaacttactcttgcattttagtttgtttactatgcagaatcttcttccttatatttacaataagttacacagaagtatgttatgttctttatttttaaattacttgagaacttgccaagtttcatctttattgatgtttaatatatcttggctgtgggtagtgagaactttttgtatgatgtcagctttctaaatcacattgagacttgtgtggctcagcctatcatctgtctttggacactgcatgtacttgaaggcccaatctgacctttttgggtagagcccactctgaaggaatgtcagttatataaaggtattgataatattgttgtttttatgtgtatttattgattttccccttcatgtttaattgactattaagagaagtgtttacctctatgtgtggctgctgacttgcactcttgtcacttctgcccctcagagttttacgtgttctgaagtgtgttgttaggtgcacatatgtcgatggtgatattgtcttcctgattaacctctgtccagtaatgctctttgacctaaagtctaattaatctaatactgtgtaccacttcatctttttcttgaggagtgcttgcctgttgttacctctttagcttttaatttcattctcctttcttttacaaagtgctgactgtgttaagtctgcatgcagcaccacatcagattcatttgttcagactctttgtactccatccagttagcaccctggttgaattaaagtatcagtttactagttgctcttttgtttcccattcttcatttttttctgacttagagtgggttttcagtttttattttcttccttaataatttcattttatgcctatcatgaactggcttagatctttgctaattattatttaaatgatacaagagtctacagtatgcatttaaacctatattgtatatttctaatgtatagtaaaattgcttttgaaagtactgtcatttcatctttttgtggtattggtgctgttctgcaatctttaaacattatattctgtgagtcaacagtgcatttttactttttccctataaatccagtaacatctaaaatgttcatgtttgccaagttgaccatgctggcattcctagttctgcaagttctgcttgtgagggccacatttctggctttatttttcttctttctggagaaatgtctgtatgttaagtgcagatcttgtggcagattgaaaatatttccctcaagaattctacattgccatttatacccccggcctcccaactcttagtgggcttaagtcactgtgacaaattcccagagagcagctgggagagaggaaggttctggctagtttcagtgtgtgtggtgtgtgcaccattgctgtaggactctggtgaggcatatatggtcgcagtggtggagtgcatcttgatggacaggaatcaaagaacaaataaatgcctgtgcttgcaagccagggtgtggctccccgatccgagctgtactttactaatcttggtgtttccaactcagctgactcaagatgaaccaccacaggagcatatcacctttgcattgacttttggctcatgagggttttggtaagaagtctactattattcctaccttaattctctggaatgtaatatatccctattctgtatttttaaaaatgtcctatggtgtgtatttaggctgtgatacacactgcactattttgtgtttatgctgcaggctagccttttggatcttgcctttcttggatttttttattctgtatttctgcatttttggaaaggccctcagtcacacatactccacactagaacttgctctgtgtagtcactgttgctggccatcttttcatggtgtgccttcgtctgatcagttccaccctggggttttgctttagttcccagacaatttcatgtaaacctttcagctctcccacatctctctttttctttcttaaaggtatggagcacacttcctgtggcctttttgttttatgcgggctttttgtgttaaagttgtgattctcacagcaagaaaagattctttcaggggtgggtggctgaatgggcctctctatcaacagctgtggccatgacttctgaagagttgctgaagttgccagggggtgattgacagagctcctcaggtctgagggagaatggcaggcctgattgattgacagagctcctcaggtctgagggagaatggcgggcctgcattgcctgacacatcttcaggagtggcaccagtacaccagtatgagttcacagcgccacgaggcttggcctccatcttctctatggacttgagaatatctctaccttttgctccaggacagtgttcacacacacacacacacacacacacacacacacacacacacacgttgtttgaaccctccctcgtttccttcttatcttccttcctacttttgctagttgcctttcttccccagttcttcaaccttctgcttgcctgtcacacacattccattacctccttactctcctccttccttcagataatttcatgtacacatacacagtacacattgtgtgtatgcacgcaattttcagtccagtctacagaggagatgcctttcttgtctttctgaacctgatgaaatctgcttccgtgactcattctgtacagctgaatggacttcactttgtccaagtgccatattttctgtccatcccactatggatggaagtcgaggttgtaggaacaggtagtcttttgaaacttgaagttctcattgaagaaatcactagtcttgaaccgctggccttcgatggatatacttggtctgcttcttgggaacttcgtgtcaggtatctcaacacatgatctactagtgtaaggaatagtcctggctacagttgttttgttttgcggggagcttgcacactcctcagatcagtgaccagattttttcattttgtatccctgtggtttttgtgggtagcttgttgttttaaaaacttttttcaaaggagtgcattttttttttcctggcaattccatgtatcctgtgtaagtgtttttcattattaataattttgagaagaaccaactccaggtcaaaacatggttgctaaagccactgtgttttatccagtgtcatcccagagggttttgtgactgttctgccaaagtttgtccatcccacattcctcctgttctcactgtcaacagcctggttgtggaaattacttctatgcattttgcctaagtcaacaaccattaagagaaattcaacaagacatggaggttcacttctctagacctgtaggctgacttggagagacatcccccactgctcacactatagaaatttccatttctgcttgtgacttgagtcccagcttttttgctgttcctttccgtcttcttccttggttgggcttcgtggttagagatctcctgtttaattgagttgcagagcggttggttcctggcattttccattcctgtgtccaacagagagggtctgtgcatgtaggtacactgcagcattttaataatgaatctgggcttgaagagaaattgaattaaattcttcagttattttagaagttctaacatcatgctatttacatttctggccacagcgaaagttttgtgaaactgagttctgcaggaaaaagcttcatgtgtcaccataatcttggaagagttttgggggcttgttttgcccagagttacagctttaaatagtcttcataaatctccagttaactaatgtgcattatttctaattaggagacagccagaaataagatccccaactgaaaggaagctgagttgtggatggttatgggacagctgcagcgatagtactttacgggagagctggagtcgaagcctcaagcctccactttgtggtcagtgctcttcccaccactcaccattctgtcctatgaaaacaaggctagagagtataaatagtataaataggcatagacacacccagatgcatttcatttctgtgacatagatgagagcaagtggaggaatccatcccaccttactagacttacacaaccagtgctcatagcctctaaggttatcctttggtttctgaaaaagaacatttttgtggcctttgtttcattcaacctcttgaacgaaataattggaataatttgcagtggttctcaagctgtgaaaatagtagacaaggggtctgtgttggccgccattacttcatgcttagtgtcagctctccttgttcttagtaggatctttctgcttcaggaatctagccttcctttatgtggactgtagaaagtgtaccttgttccagcttgtagggttgattagtctaaatgaaacacctgataccttctttgcttgagatgagagtgtagggataggcggatcactgccttacaacatctcggcgactttgcctctggcttttgtatatagctacaggtgggatcagattcaagggagtcagaggaaagggctgaggctcaatgctgcagggtggcatgcctattcttccaggagatgctgattccatatttattgttggaacacttttgacccaggattttctgttacttacaagggcatatgtgtacctgctaaaacttggcttccttactcctctctttctttacagctctttcgtaggaattaagcttagcaactaaaaggacagtgtgcactagatatgagaatgtagcaccctgagaagactgagcctgggaagttggtctcctggggtgtcttgacatggtgtcatctgatttttgctgatgaccttctcaggtatgtgaagccactgctgcttgttcatgactcaagaggacaacacaagactttagtgacatcagaggacagcttgtgggaattgttgagttttcttcttccacgtggttccagggttgaaagcagatcattgagcttggctttggctcctgtgctgaacggcctcattgtcatccacccaccatgataattctccatttccatccatccatgactcttacatcttctttgccattggtgcacatttgcattgtttccatattctggatgctgtgaacactactgtactgaccctggggtcaagaggaagcagggaacaaaataaaaagtcaacctacaaaactaggaagttgaaattatgaattgtgtttctaaggagggttgagatcctcggttcatggacagttcctacatcccaacagctgagaaataaactgtccactgaataagtgtgcagagcatcacagttgagaccctcctaggagtaggtaccagctgccaacattatgtgaggtgtgctgttttgggaatgggagttgggagcaatggtagagatgtcccatgtcggctcaacctttactctgtcttattctcggtactttggtctgttattcatcttcccataactgcaaaaagatgcttccttgaccaagggtgaaaatgtctctagcctgtgagtataactgtgaatgtttagaaggcaatttaacaacctgacaacttagcaaaatagcaatggcaggttctactctagagcctgtggccttaccatctgccttaattactatggatctgaagagacaccacagccgagaaacttatatgaaaggaagcatttacttaggggcttcctcacagttgcagaggaaccatcgttgcctggaagcatgaggttttgtaggcagccatgggtgctaaagcggtagctgaagacttacaccctgatcctgtggcagcaggtagtgtgactgagcctggcatgggctttataagccttgaagcccaccccaagtgccagaactccaagggcacatctcttagtccttccctaaccgttcaactaactgggacattcaagtatgtgagcccatggggctgttctccttcagactaccacatgctccctcggcttttgagtaggcttgtagtaccgtgcttgaaatcacttcccacagagcagatctcaaaccctgtcagaaagcaaccatctccctaactattgtaccactgttaatccagtaagcacagtttgcctgtcaggtctcttatagcattcagggtctgactgctgggtaagaaattgatgtgtccccacccctctcccagcagcctgcatagcaccttcctcactgtgaaatgctggccagcagggaggaagatcgagttttctatgtctagcaggcaaagggacataagctttaaaacagcagtgctgtgtgctcactttgaacaagctggcttcggtagcgccgcctgcactgtgcagcaggacctcttatgccaaggtcaaggctgagctgcacatgtcccagtgtggtttagttgctgatctctgtgttgatacactatagcacaggcctctgaggctgacctagggatgaagctctattgtgaatttggtctgttggtcctctaagccattctcacagtttgtggtgtctgttgggtctgatgtatggatagtgggaaataaacaaggaccccctctcctcccgagggttgacactgaggtgacctcagaagggtcaccttttcaggaactttctgatttgtttccctcaaattgcaaactctgaggccagttaggggccttagctgtacatacacctgtgttaacttattctggtgtctttgcttgacataggagcctgagaatagaacagctacacaagtgtcttgtacactttgaacagtttctctgcatactcctggggagttggtggtctgagaaacaaactgtcttagttagggttttactgttatgaacagacaccatgaccaaggcaagtcttataaaggacaacttttaactggagctggcttacagattcagaggttcagtccattatcattaaggtgggagcaaggcagcatctaggcaggcatggtgtagccagagctgagagttctacatcttcatctgacaggtgctagtggaagactgacttctaggtaactatgactagtgtattaaagcccactcccacagtgacacacctactccaacaagaccacacctcctaattgtgccactccctggcctaagcatatgcaaatcatcacacaaactaccaaaattttcagattttcaaaatcacaggtataatctaaaattcacaatattattattatttttttttaaaaaggactttgtttaagatacctttagttttttttttttttaacagttattttcttggaaacacaaatccaagaaaggaggtttttctagactggaaataaagagtggatttcagcatgtctatcagatcatgactgccttgcattcaacatgaggagtttgctgagcgagattgcttaggctttgaggggagtagctgaacagatgctcaagatgagaacagcacaaggtccagacactgctggtttacataaggttcaccttcaaaccccaagctccacgttaccgtagcctatgcttctatgccatgtggccatccagtgtctaccccagtcatctgctcagtgtgtaattctggtgtgaaaagacagccacagtgtataaatagcatgggttcatttctgcaggtctccctttcctgcacgccctagttctcaagtactagcatacactttaataagttataaaatgcactgacctggttaagctatcttgttgaattgagataaacttgccttgtaaaaaacactgctatgtcctagaacattctttttcttacttcctttatggtgagtcttgtctgcctttttacccttgttctatgtcttctagggtcctgtgttgtatgggttagtttggtctgtatgacagttggatgcatggacttgcacagtgagccttttaatttgctgacataatgctttcacctttatgattagccctatggtgaaaagtttctgaagagtggtcagaaatgttagcatatcccctatgggtgagagatgctagcaggcatcacagtgtcttcagagtgaggatgcttcagcagggcgttgcacctcatgccacaattctttgacagttgtggcagcccctcaggcatttacaaggccagttcatatgggaaataagatcactgtagccttgtggctgagtatatagaaaagaggggctggttccctggatagtctggctcccagacctatgagtatgagggaggagtgtccctcgggcaggtgctggggtacacgttgagctctggccctggtccccacccctactcctgggcagtcagaggtcttcactcagaggaagtttggcagtttccttcaccctaacacacaagttgaacaaaaaggtcaggtgtctgtgttggcaagggtggggccgctctctccatcagatcacttgtaaaggtggatttgatctaactgtcaagctcttatgctcagagatccttttcagggttggaagggggaaacctcatttctggtcattttccattctttcatcccatttccatcttgtttcagtgaaggacacatggaagggacctctgtgagctgacattacagaggggccttgtcataggtcctctctggcatgctcctccatccccagtcttaccatgaactaggagaccacgagctcacagaggcctacacgaggtacttatggctcagctcttcctgccatctatctctgtaaagattgtggtaaaatatccatggtacaagttgatactttcagattttgaagtgcacagtcccatggcatcaggtattccactgttgctgtcacctgtctgcagaactcaccttgtgaatacaactctatccttcttaatttaaaaacatttacaaagtggatacaagcttgttttgtatgacgtttaggtctggcaatttagttatgcagttttggggtagagtgggtggtcatgaaaacatgtatccaacttaaaacatttttattcttagtttagtctttggatttttggacccaaatcttttaggtgttttaaaattccaggttggaattcatctcttctctctccctctcggtcactcccttttcctcccttactccctcccttccttcttcccttcttccctctctctttctaccttcttgcctttcttccctattttgtttcctggttctgaagatgaaccatgggcactgtgcatgctaacctgctaggcaaccactcctcactgagctacatttctagttaatgcaggtttttttttttttgtttttgtttttgttttttttttgtcatctgtcaatatttatggagctggtgtcatgctcagttagatgctagaaatatataaatcaagagactttgatttatatattttgctaatcaatatcaatagaatgtaattaacggcagtggttatattttaaatatgacagtgatgaaaatgctctcttgtgattggtactggcacctgtttccatgatactgccaagaggaattgctttcagatgtgaattccacaataaacaaaagagattcttctctctaagcaaagaatggttatttccagtgacttgtaaaacatttgttattggaaatgactcattaaatttcttatgtattttattctattacatgattcatagaaataaattatttttctagctgttgcctttgttcccattttgtatattttatatctgaatataaagttaattttatgggaaggtttttctatttaattttatacaagatatgaaattatgctgggcagtggtggtgcatgcctttaatcctagcacttgggaggcagaggcaggtggatttctgagttcaaggccagtctggtgtacagagtgagttccagaacagccagggctacacagaaaaaccctgtctcaaaaaaagatatgaaattatatatattaatatgtaatatataagtaaatatataagtatataaaatatagattctttgagatttatggtcaggagcatggaggcaggaactgatgcagaggccacggaggagtgatgctcactggcttcctccccatagctttctctgttacttttgttagagaacccaggaaacctgccctggggtagcatcaccaccatggactgggccctcccatatcaagcattactcaagaaaatgcctcacaggtatgaggacaggccagtctgatgcaggcattgtctccgttctgtttttgttttcccagatgacccgagttttctgacaaaatctaaccagcatagctttgaagagagtgaggtaggggacctgacaaagggtcttgaaaacgatggtggggaggcggtacgaggaaagaggagggatagcaacattttggaggcagaaactgacgacggaggttatttttatattttgctgttggaaatgtggactagtcaaaccccttggaaggtgatgtgacactagctataaaaattaaaaatacatatggcagttgacttagcacttccattccttggaattcagcccttagaaacatactcagtatagaagggtttctgtttataataaaagataactgaacacacagtttgtgtctgttagtaggggaattatcaaggaaatatatatgcattgtggatctacataatgtattcttagttatcattagcaagacaataaaaaatgtgtattccagtgagaccctttagtgataaagctagtgtgtgtgtgtgtgtgtgtgtgagagagagagagagagagagagagagagagagggagagagagacagagagatacacagagagagagagagagagacagagagatacacagagagaggcagagagagagagacagagagagagagagaaactgagactgactgaggaggtgtgtgtgtgtgagacagagacagagacagagagactatgtgactatgaggaggtgtgtgtgagagagagagacagacagagacagagagacaccatgtaactatgaggagggacccgtgttttgaagctataaggaaaactgccttaaaacctgttcattttgtgtgtagacaagtgtatataatatccctgtatgtgttgctgtgtgtgcgcatgtgcgcatgtgaggtcagaggttgacactgggtatcttcctcattcactgtcattcacccgtagttcacctgtcactcttgtcttttgaggctgggtttgtcagggaacctggagctgatgatttggctagactagctggctagggagctgcaggaattcatctatcccccatgccccgcagcccaagaggcagggatgtgtgctccctcaggtcttgtatacatgagtgctgggacccacacttggggggggggctcatgcttgtgcagcacgtacttctctagtggaaaaacacccaacacataacatctccccagtgcccagtcataggtgtgcaattcttaaattttacttttgagattatagttgcaacatttctgccttttctttcctccctccaaagcctcccttatacctctctccactccactctatttcaaaatcatgacctcctttttcatcagctgttattgcatgcatttacataccccccacatccacatatacacctcccacacatacacactccctaaatataagctgcgtagtgtgtttactattacatgtatgtatgtttttagtgctgaccgtgtgacactggatgaccacttgtgctcttggttggggtggtccacctcttctgttcctagctcagaactgtattctaaagttcaagtgaacattggtgcattcaatagaggatttataagttctttgtttacaaagtatacctcctttggaaacctagtcacatgatctgccaggcagtccatacttttagggttaattgctttatatctgggaatttagatggaatttatagcctaaaagaagaggaagaaagccactaatttatgaagacatcttagatatttaaaaattagcacataactaagtttgcatattgatggagtattggttggtaatagagccatccaagtgccatcatgaggtcattagaaatgtagtaatgtagtttttagtatagtgaatataaaatcaatttaaagtggcatgtgcagtctgaatatatttctgtgtgctagaaggaaacaggatgaaatgcagacagaaaggcaggattatggtgaagtgtttctgcattattttgataataaaatcagacaaagtgttggcaatgctgaaagtgaaatttaggaaactgttatatgtgggtctgaaactaactctctctctctctctctctctctctctttgggaagaatgtggtaagacagttgttattatgcctcaggtatgtgtacagtgttaatattttgattcaaaattgtctgggccagttagcctaatggtatacagcttaagtccagaggaaggcaccaaccaggcaattccaggagaatttagcttgaagtccacacaaatgtatgagaattaaatatcatgtttctggagggggatgggattggggaggtctggacacctcacggccctccctcatgctgcgctttttggttcattgtattgtgttaggctgatgagagtgtgcagtgtttattttgttgggttgtcttgatttaaacttggttattagccctgagaagattttggccgtctgattttcatccatttcttcatcccattctcaatgccttctccttttggaattttaattacagcatggttgattttctggcagtgtgtagaagcccaggagtggatgctgtttgttagctttttctccctttaattaccgtgtgtgtgtgtgtgtgtgtgtgtatgcgtgtgcgtgggtgtgcatgtgtgtgcacatgtgtatttgtgagtatctcttgtgtgcatttgtgcatgccttcacctgtatgagcatgtgtatatgtgtgttttcatctcttatatgcatgtgtggacatgtgtgtgtgtatgtatgtatgtatgtatgcgtgtgtgtgcatgcctttgcctgtatgaacatgtatgtacacatgtatgtgtgtgcacatctcatgtatgcatgtgtgcatgcctttgtctatctgagcatgtgtgtacatatggtgtgtatgtatatctcttgcatgtgtgtgtaccttcacctgtgtgatcatgtgtgtgtgtctctgtgtacgtacatctttttgtatgtatatgatgtgcctttgccagtgtgagcatttgtgtgcacgtgtgtgtgcattttttgtatgtgtgtgcttcagttttgatgcactgtgtcgctgtgtttacttttctcttgctgtgtaagctttataaatgacttcataatgatttcttttacatttttaaatcactggcacttttcattttgccctttcttagttttcttctctttcctcttatcccttttgcatgctatctctcattccattgtatttcccaattgcttacattaaaacattttttgggctggcaaggagcctaggtaaaggtgcttgctggtgagtttgaagcctggaagagacatggtggagggggagaaccagctcccgtactgtttcttctgacccccacacttgtgctttggcacccacgtgtgtgtgcaagcacacacacatacactgaatgtaaacattgaatcctgcttcattacgggagagggtgttggatcactggaaaatggaactacaggcagttgtgagggatcatgtgggtgctggaacctgagtctctgtgaggacagccagtgttcttaactacagagccatccctctagcccttcccatcactattttttaaagctcgagataatttatgtcttgaagtgggcatcccttttcttcttccagacaactggtgtttctaaaacagactcaccgatcacattagagaactagaaccacttaggaaaccctgctcatacacacctttgctcacactcactcccagttgtctatttgctttccaggaaaaaactagaaagtatcccttccctatctcagtagaatcttatgtagaagctgttgactctgctattactgtggtagatttcagctcacatttgtgaatagataaaaagcaaaacaaagcagaggccaatagaatatagaagatttaattaacatattgctcaatatatataaaataaaaagaatggaatggcagataaaccagtcattaaaagtgctaacaagaatattgttaataactgccacccctttaagaatagtttttttttgaaaaaaatattacttacaaaatctggagaaattaaaagtctgaattgtcctataattataagaaactgaatctccccacaaagcaagcaacaggctcccatgatttgttaagccaaagtttttttttttaactaaaattctaagaaatagattattccattctgatgcaatttcttttcattaacaaaaaaagaggaatattttctagccagttctaagagcccagctcaaaaaaaatggtgtcatgaagacaccatgagaaacagaaactgaagatgcttcctggttccatggagtctgaagctcttgcaggacagttctgtcaccagacgggtcatcccaggtgtaccagggcacctatatcacatgacccataactccctagtgacagaagcttaaagaacagctgcaggacagtttcacttgatacgcagtgtgacttcctggtgatggtgtttagcaaatgaaggaagtaggaacccgtatccttaggaaccaatcagactgttgtcagcaggcctccttcctatatggggaaatgttagaagatttcctgtaaccaggaatggtaaagtcatacctgagttaacatatgctgtaaacagcattcactaccgaaaattctgaagtcagggagttggctgtagaaaatgtgttctgtctttcagtccttacctgggatggtctgtcactggaggtggtttggcgtcatctggaatcttctgaaattatgttcgatcattcaagtctagggatctgatgccagtggttggcagtcagtcagaaagcttcttcaaatggtctctctgttggcttgtgtggtctttctgtgtcctggcatctgtattccaaagacaagagatgaggagcagatgtgggaggagactgcattccgatgcagggtggtgcttggctgtcctccagttggttaaggtggccagggtcaggagagaggatggtgctggtgtccatttttagaaagacacatgagattgtcttcagcaagtgcagcctgccacatggtgtcatgtgtctgctgcagcagtagggaacatggcctacgttcagtgacgaggaacagaacctgaggtggtaggaggtgtaatgggggaaagaaagcttgctctttggaggcaaaatgatcatttgcatataaaattaatgagaaagaatatagagataaattattaccaataagagtttaccaaagaaagatggaggtaagacagtttgctagataatgtaaaaggagacattagaaccgtagagcatcaggagtaagcctgacaggacatgcacatatgtcctttagggaaaataacaagtatcactgataacccatagtgtaccttagtgacagttgccaggctcagggtaggactgctcagtgctgtatgggtgtcatgtccatcaaactaattctatagctagaaatgcacatattcatgttccaaaataaatgttatatgataaagatactaacaggttaatgaagaaagatgttagtttttaataaaagaaatggggaaacatccatattagaacttcaatttcactacatgtaaatattaagctgtagctagcctaaccatttaaatgtctaaacatgttagcttcctttgtagcaagtacaggtatatatctaaaaatatgtaaggccaaaaagattcaaaaagactaaaactgagcatttaaaaagaatttgtttgtcaaaatctgactttaacaagtaaaaacctagcttataatttacacggaattgacagattgggctggtgatatggctccttggacagagacgtttacttaggatgcctatgaattgtcctgtctctgcacatacatgtacataaacttaagtgtaatagaaagtcactgaaatcaactgtgcacttgttggtagtcgatgaagaaggaacgggtaacggtttattcatttgcaggaatgggactgtgggtggagggggcagggaggaagtcctcagcactgagttttctgttggttgtggaaaggccattcatctgtccgttgctgtgacccatagtggtcattaacaggatacgctgttgtagttttacttttaatcatgagcactgacatgatgcagaatctgtcttcctttgatgcatagaggtgcaggtcagacattttattgggagatttggagcggagactaacaagggcctagaaggtctttgttttgcctcatcagtcatcattcccaaagcaccaattaacaatattctttgaattaatagtctaggaactgcccagtgtaaggtgataagaaccaaaggccatggccctcactccccacactacctcaggtttcttacagaaacaggacaagggtatcttctagctgagatggccatcccatcctgatctcacatgagagacttgcaaggccataagctctgtcacaaccatattcattagtgcttccttttccacatctgcattcattggaaactctgtaccaaagagaaaaatctgcctttcagagttggcaaggcaggggtgtggccaatgaggctggtggccagtgaaatgggtagccattgaggggtgtggtcagcgagagggtgtggccagtgaggtgggaggccagccttttccagttgggcagtgacttcatttgatgctcagtggcccatgttctgcagagttgagacactcaacagcccaactttccttctctgaaggctctttctctgtttgactttctagttgtctgctttgcttttgggcagctttgaagtcagagtcatagtttatttgtgtgtaaatacttgcaatgtgggaaagtgtagcatgggaacataaaaaagtccagtttgttcactggtaaaatgctattttaaagcatttatgcttgtatttagtttctaagagaaacaaacttgctttgactttttttggtaatattttgatggaaatactaggtagattggttagtaacagtttgtttttctgcccataatttaaagttgtaaaaggtatttttctgtgaaacaatggccatctgtgttttctgcttccctgccctgccatgttttcagggttgggtgttgagtgtatctaaacctcatgcgtatggttgctacgttgtgattttcccactgaagacctgtgcccttgtaacagggaagaaggtgtggccctccctccccagcctctgcctctgccctccgtggtcacacagggattttggtacagctactccgtgtttgcattattgcagttatcttggttcaggacgggagcggggtggttacttttcttgtccagtgtgttggtttcagtcggccagcattgtattcactgacacagcgctgaacttccttcccagtgtagccacgaggggtgaacacgtctcccaggagctttctgactgtatccagtcttcctggcccttcctgacatagaggcagtttacctgtctgagagatggatttcccaatctcatgtcttctgtctgtcacacacaattgttttttgtctttttgtggcactgggggttttgaacacagagcccagggccttgtgtgtgctgggccagcactctgcccttggttcatccccagctccacaagacatttgtaagaaggaaaacttgtgttgagacctcctgggtgtggctatgattctattctgtcgtgaactcaatgagttactgcgctggctggttgtagaactctctggtacatgtcatcccccctctgagtttcagaagctcctccccagtgccctctgccttcttcaggctgctgcatgcagtcttcctgcttggatggagctgcgtccagaggcccagtgtagtcttataaaggatattattttgagttactttgctggtggtttctgagttctctgtgttctttatagaattcctagtgattagatgttacatagctcaatctgaaactttcttatatttcacccattttccattttcttgtatatgcttcattttaatggagttccccattattttctatcccacaattctttacttcatcaattgtaatttaaatcaagcccttccagtcttaccttctccctcctcctctctcccctcataagcctaggatgtcctgttcttagttcagtggtgtatgtcctgttgttagctctcaaaggatactatgtgtgcttaggacttgctctttcttccacttgctctttgtggtgtggttttctggtctcttgttattcccaagtacactgggaatcctgttcatacgtgtgttagggattttcctgttgtgaagagacaccatgaccatggcaactcctttataagtgttgcctgtataagagttccctttataagaaaatatttaactgggggctggctaacagtgcagacatttagttcattctggtcatggcagaaagcatggcagtgtgctggaagggtctgagagttatacatttgtattctcgggtaccaggaaggaaaagtgaccctgggcttggcttgagcttctgaaaagctcatccctagtgacacacttactccaacaaggccacacctcctaattgtcccctccttatgagcctatgtaggccattttcattcaaaacaccacagtctgtgagacagaggcactgatggtaaatgtgtgcggataaagtgtgtagggaagggctcctattccaagcttttaatttctcttttagcatatttaatctcttcagtgacatctggagtaaccaaaatgtttaaggtacatgcccactgtaatgcagtacatgtcagacctggaatttcagcccaaagtaaatgttgggcatcatttttgatcactctgtatttttagaggtatattctcttgatgaagccagagtggggcgattctgactagtctagccagccaccttgccccaggataccttctgctcccaagttttggggtcacagaagactttttatatgtttggtttcactgtgaattctggggatctaaacaatggttcatatacttgagtggcaaatgctttatctacttagccttttctctggcccctgtaacattaggttataaaaaccagtgctgttgaggtcaggtttggtgccttaagcctttaatttcagcactcaggaggcagaggcagaaaggtcactgaatttgaagacaacctgttctacatagcaagttccagaccagcaagggctattgagaccctgtttcaagaaaagaaaagaaaacataacaaaacacccccaaaaccaaaaacaaacaacccacccccaaaatgtacacataatcagcagcaaaaacatctggtatctttagtcttaaatatgcagaaggacactgtcataggatttggatctacgttgtttgtagaaaggccttaaaataacatttccgtagcaccatctcttaagctatccaggacacatttactttttgacagtatggaagaggaactctgccttgtctaacttaggcttgctggaacctagagcacccgtggtcaccgctctgctgttttgcgcagctcaatcagaacttaggaatctgttttcttaccacaggcgaacatgctgtgtgcttgtgttgtctgcttgctggcacccttcccatcccatgtcaggatgtgccttgagaaaacacgggagccttaactccaaaaactatgcctttgaaatgaacaccgcgcacagagtacagcagggttcacagatgctaaaaatagtaattggctctggaggttgtggtacccacgtggaagagtgtgtggtgtttacagcttgactgttaagtttttggatacatagcgtcctttgccatagtttcttcccgacagatgttgatcatagcagaattctctttagtcaagacacagtgaatgtcacttcatttcagaataaccattgtcgacagttcctggaagtccagtttatattttctataaaatataagcacttgcatagagatggctagcttagctttaatttctagatttgtaaacagaagtacaccttttgaggcgtgtcgaccagactgagtaagcggtgacagagtggctgtctcttctgtgttagccgttctagtgactcagtgctatttataaactgatcttatttccatccacacacattctttgtccattctactttttgtgcaaataaattggcttagcctagtgaaaacaatctgcgatgcgtgcgtttctttgctgttacttttgtgaagcgggtggcgttttcttgatgcaggtgttgctatgtgttcctcaagatgtggagcataaagacgccagggctgctccactgcatgtggggcttctgctttcccgtactcagctgcagggagagagcgtaacacactgccatcccttcaccttcccaggctgttccttccttgctgttttagctttgggtgctgagcccacgacacagtgcataccctgctgaagcttgtctctctcctaccttgagagagagggcatgagtgatcctggatgttctcatgtttttgccgtgtctctcatgaacacacaacttgatttaccttgatcagcccagtaacttgctccacatttttccaaaagtgcaaagcagttttagctaaaaatacacatatcaaatgctccagaagtcgtggccacagctcaaaaatgctgatcaattttgaaaatctaactcagcccggccatgaaaccgagggaagaacctttgtggtggggacagatttccaaaaatttaccacagtcctgttcttagcttgagtttgtgctgatgttgccagacaactgaggggtagatgcggaaagcaggaagcattactgatggggccctagcgccactttgggaaaagcaaattaaaatgtaaaagaatatttttccactcctggagtcgcaacagaaaatggcaaaataaatggttactgaaaaggttccagaaattgctaattttgtcagaaagtaaaagccaattaccagctgtttttttttttttagtgataaaaatggacacatacagtttaagaaagcctaataatttcataatctggacggagtagttttgatttacaaagcactatcctcctttaagtcacgggtgtgttctgacgcaggtggctcatctcaactgttctgtgtttcaggtgcggcttaaagaatggatgatgacgactttggtggctttgaggtaggtgctgtctgttgttaactcagggtaacagtgaactgttaggaaagtgtgtttactcttgttgtttctcggtctgttctttctgtgtgtatcttgtctgctggtgcatgtggtgtgtatccagaggccagaggacaacctcttattgtctcatatttgaacctgttcaattttttttttttttgataaggtttctcactggcctggaacttgtcaagtaggttatgttggctggccagccagcctcagactggctttcttagcactggaattacaaatgcatgctgccattgcccagatttttaaaagtgggtcctggtgaatacattctggtcctgtgttggcaaggcaaacagtttaccaactgagctattggtcttacccacaggacctattctgaatcactttgatataactctgaaacatagattaaaatcaaggaaaattaagaaacatcatctacctaaacattgaggtgtattgctgttgaagctctgatcttgccaccataggaatggtttaacttgggtaatttattgtggctggtgaagcatcagggagcgtttctgagattgtcagccatggatgggactgagggcacatcttcagaaaatgctggtgcactgagaaatgggagttagatgccgtcatggctgttcccatctgtgatgacatgtatatgctgtcacagtgttctctcaggtttcggtggcattctagaagtgccattgttagctgaaaatgcagtattttccttagtcctttccaacgtgtgctcactttattgaaatattttataacccagttatttttatggagccagtagagtcttgcaggaaaatctctggattaagagttgggattccagggcttgagccacccgcagtgcgcaggaggactttctttttcctttccttcctctttctcctatttttttcttttagatgttcatatagtttgaatttggtaaaaaagggagtgtaatgtcagtaggagaagcagggtattattcaaggaggaataatatggttcttttcagcagcaagtcatgttctatctgtcttccatagctgtcagtgtatagggagccagtgtggtcatacctgttctccatgtgcaggcagctactacagacacacatgttctccatgtacaggcagctactacagacacacatgttctccatgtgcaggcagctactacagacacacatgttctccatgtacaggcaattgctgtagacacacatattctccatgtacaggcagctactacagacacacatgttttccatatgtaggcagctactacagacacacatgttctccatgtgtaggcagctactacagacacacatgttctccatgtgcaggcagctactacagacacacatgttttccatatgtaggcagctactacagacacatgttctccatgtgcatggaactgatacagacacacatgttctccatgtgcaggcagctactacagacaaacatgttctccatgtgcaggcagctactacagacacacatgttctctatgtgtaggcagctactacagacacacatgttctccatgggcaggcagctactacagacacacatgttctctatatgcaggaagctactacagacacacatgttctccatgtgtaggcagctactacagacacacatgttctccatgtgcaggcagagactacaggcacacatgttctccatgtgcaggcagttactactgacacacatgttctctatgtgaagggaaattactatagatacacatgcatattctccatgtgcagtgacttactatagacacgcatgttctccatgtgcagagaactgctatagacatatatgttctccatgggcaggcagctactatagacacacatgttctccaagtccaggcaggcagtattgatatacatgtattccacattttatccaaaaatgttttttaagctcatttgagtgcttcatacttttatttaatattgtgtgttttgaatctttttcatgttcctgaaataaaacatttaaaaatttgtgaaaactccattgacattgatgagaagatgagtttcatactgttacttagcttgcagtagtgtttggaagctgttatttaagggcctcattcaaacatattctcctatctctaaaccatcatagatccatagcaaagccacagttgtgctttcgcaagtgactagtgagtccagcatctcttcacagtgtggttggtcctttccacaccagatcctgcactgatcagcatgacggcttcatggcactcacctgcttccatttcagttctgctagggaggagtggaaggtgtttgtcctgtgcttaagtatagtgggctcgtcttcacagctagtgggcagcaacagcctcatcctctgctgcctgtgccctttgactctttgtttgatgactccgtgcataataggaattaacctgtgtgaagctggagctctgattttgtagtaatcttgctctgacagttacttgagaacttttgcagctctctaatatttgatgttcatgaatccagagtagactgttgaagaagtcaggctcactgctcactcagagtagtctctaagacttacgctaacctaagtgaccttttaaaataaaagattgtctatattgaaagaaaaatttacatagatgaatgaatgttgtgttggagttaaattagagcagttgaaatgaagtgcacaagtgaaagcgtgatgacagatatatgaaatgcacatttgattgacaggaggttattggaataaggaagggaattgcttacctgagaactggggcctaggcactcccaatggagaacagtgcagaggttggcagtgggctgaccagagagaatgtgggtgagaggcatgtcacagaggcgtgtctgcctgtgtgtgacaactggtgtaaagtccagctctataggtcttttcaggttgtcttgccttgtcttccaggctgcagagacctttgatggtgagcaaggaggaaaccaagctgtgtctcctgctgtcccctgggccacctttcctgcaggtactactacctcctagtcacaggattcttttctctatgcaatatgtttttggtgtttctaaaatctacttctctctctctctttttttttttaaattgacattttttttctgacctgaaaactgtagtgtcctcgattcactctgaatccaaattttcttttttttttcaaagcatgaattgcattgcacacactgtgctagagtgagactgcttgtaagaggagattattaagagtaaatgaacctaagtacacatccattgttcaaatttcttggcttaggaagctatcaagaaccttcttgggttatttgcatatgatataccccattctgctaaagtcatttattatttaaatatagaagtattacaaattaaaaataatagttggccaataaaattttcaaaaagtgtttaatatcctacctatcttggaatgcatataacatcactctgagacttcctcttctccctgttagaatgcctgcatctaggaaactatgacaatgaatgctgaggaaagagctctcacccagtgctggtgggaacataccgtgttctaccaactcctagccatgcacctaacaggctgggtatctcactacagagataactgcacagctgtgttcaatgctactcctcccagaagcaaggagtagatgctatcaacagagatatgaaaacatacttatgcacattgggatttgatcagttataaaaaaatggagttacaaaatttgtaggagatggatggaactggaaagtatgaagtgaggtgagctgggctcagacagtcatgcatgtattctgtcatatgtatatctcagcttttgactttcatatatgcgcatgtacctgggactgaggagcgtccgtccatggagggaactggaatggagcacatgtgatttgatagtggggagggaaggtcctgggagtggatgagcttgcacttgggtagagcaggcagtacagggttagggggttggaggaaagggtcaaataaaaactagtaagtatgaaaacaccataaggaaagttgacactttgcatgttaagaaaaaaaaaggaaagaaaaggacaaaaatgtatgtataggaaagaaagaattctcaggctagttttgtcttctggcaccccacatctgtactctcctatcctctcaatattctgaattctggtttgaagtatttcttgcattagtatttttttttccccatggagatttccaggtccttcctcccatgtctcagtatgtccattatcagacttttaaatgtttaacacttcagttgggtgggcttaggcatcgtgtttgctgtgtgataggtatgtctttctcaatttaagatttactttttatgtgtatgttgtctctgcgtgtatgtttgtgcatgtgtgtgttgatgcccttggggacaagaagagtatgccaggttccttgatgctgtggctacagacagtcctgtagaagaacagcaactgctcttaatcccagaacttctccagcctccctgtggttttgtactaagtgcagtgtgtagggtatagatgccctcagtacagactcacagttgtgtgactagtacccaatcatagtgtggtttggatggccatgagaatcagtaggaagagtcagtgcgatcttgaatttatccagtggctcagggtgctgctgctgtcagctctttatcagaaggtgggctgttagttaccctctttctgttaaacagatgaggaaattatgacttaggaagattgtttagtttgttagagggggtgtgtatggggatgagacctgttctttctagtcttcctgaccattttgttccttttcagtagctcaagtatctgaaaaaatctgtcagcaggaaaacttgatgggatgtggtcatgacataagaggtggagttgagttttgaggattaagccttgtttctgatagaatgcggctgtaaacagaaatagcagggtgggttggatttcctacagggtgattatgtggaatctctacagcctatgtatctgaggagccagaaacccatgggaaagcccagagctggagttcctggctgggaaggtttcctgctgatggcagtggttgtgtttgtatgagataccaggcagggatactggagtgaatatgaggagagaggagcccttatccactgctgctgggaacacaatctcctgatgtcagtttgacaatttcacaggaaagtaaaactggaaccacctatttcccaactctaccactcctggacaggtacctaaaggcatttacagagagacacttgcttgtccttgttcaatgctacctacccacctcaaaaggacaagataaagatgttgtgtaaacatgtgaagaccatgtgttaaagacttggttagtttggatgctcacaatcagggaatggaagcagtaggagaggcagaattctgtgagatgagggagaggggctccttcagtgcctgggtgtgagaggtagttcccaagaagttccggtcactagtacaggctgtgtgtaggccagtgagccaacaacctctctcatcccacttcactctttccttcatgtcccccaaaatcccagctctgatgatggtgttcttctaggtttccttatgggtttgcaggaatggatactagcagacctggctaagggatgtccttaaagccatggccgtctgtctttctctcctcttctttttacagctgtctttctctggctgctggattcaggtaggtagatccaggatccagcattttatctggtctgtgtggagatcatttccaggatggtgatgtgaactggttactatgcatgatggtcccttctacactatacctgtttgtcatctatacagaaaatatgttttcaaggacatatcttggaagataactcaaacattctgtttaagttttcattattttgggggaatatgaaaaggctaatttttagggtcaagatatgaattttgttagtcagtgagcataagaggtgtagtagtatactgagaataccgcttcaaaccaagctagatgactgcttctcagcagtcatccatgtggggataattaatgtctctctccacatgtatggttatagcctgtggttctttgggcagggggcaagccttcccagtacttcaggaaatgtgtcttctatgtaagtactcactcaaggccccactgtgggtgggatacaggagtgacaaggtgtgcactgtcctctgtgcacactctaggtttgttcatcctcctcactcttgtgtagtatctgaccttcttggttacctttcctgtgatcagatagctgataagaattatgccctgatgtcagattcctgtcatgctgagtaatggccaatgtcacattcttgccagaagctcatttccttgtccttggccaatgttagatttctgccaagcggtaccccaaaaggctctccacatctccccccttttaaattaataaacaaggccgaacctgtcttaggttgttctgacaagaatgtccttacccgtcctcaagacatgcacagcttgtttgtgtaatacgaacaaacacagcctttttgtgtttgttataaacaaacatggtctttcagtgcatgcctctgtcttaggttggtaaggctctgtgcagaatcttacccttccctggcttgccagcctgttaatagctctgtttgggggtccatttttagtttcaagccatgtactcgggccgccaacgtgttgatgttgttaaagacaagctttaacacaatgggcaggaataaaagtattcccagggcaagaagggctagcatgatcaagccatatatgccattctagaaacttgaccaagatggaaatactgacttcaggccatggataatttgatcagcagtatcttcagcagcaaagctcagcagagcagcattctttaaattcatagtttcactatgcaaagttaaacacccagaaaggtgttggagttataggccaaacaccctgcaagtgtctctgaactttttcccaattatagtgactatctttgtaaattttagaagtaacacaaatccattagtatttggcattacactggagatgtcttcctacttttagactctgaacctcctctccaataatttgaatagtatcataaagggcatcagtctgtaacagggaaataggttaaggcaggaattttaatcttagggtggaacaaaagaagtaggattcaggcaagattttgggcttggacaaggaaatgggctcaggtgttttggtcattctgacaagcccttggaaacaacagtcacaggattaatcacggggctttgcttaccgccttgctagttccttattgtactgctcgcccttaatacttgcatgcaattaagatggtataaaagtagattgggaaaattaaatttgccttcagtctcactattgactggggtcatgcttaaaaaaaaaaattcaacttgagagaggaagggcccttcttgatccataacttgaggggatgcagcccatcgtggtaaaggagtgctgacaagagtgtaaggcgactgtcatagtgcatccttgcataagaagcagagaaaggtgaatgctgatgtttggctcacgtctcctttatattcagaatgggtcatccatgggatggtaccgttctatcctgccctgtcctcattcaggatgagtctttgctccttggttaaacctcctggaaaaccgtcatccagaaatgcgtctcctctgtgattctaaacttgtcaggttgacaacgaagattaaatgtcacattacctaaaatacataattaattcataatcatagcatgttttgggaattgaagaattcaagtgaagatggtgagcatgaaatgatggcccttctcttactgccgcctacagcctggaaaccattatttcattctagtgagaatgcaagagaaacagccttgttttcaacttcacactgtagacagtcaaattgatgtgaataacctgtcctaccacctcactgcctcttcccaatgccccacctcccatctgctcatctgagttgtatgttttctttaagaaaaaggtgttgagagaatcaactgacctggactcatgggagcttgcagagatcacggagcctttgatctgacttagttcctcttcatatatgttatggctgagtagtttcgtattctcgtgggactcctaacagtgggagctgaggctgtctctgactcttgcctactcttaggatccttttccctctactggtttgctctatccagccttgatgtgttagtatgtgcctggtcttattgtatgtagcatgctatgatgtgtttagttgatgtccctgaggaaaattggaggtgagtggatctgggggagagggaaggtgaggggagatattggggagtgggagaataaaaaaaggaggaggaaggtgttgaattttatgatgggtactacttctgaaacactgtcataatgttatttttgtaccacttgtttggtgcttagtatatcctaattcatatttttaaaatggtggtaagaattaccatctttgttattttagtgtatccattaataccatatcctgtacaactgaaacttcatactatcagacaccagtggctttccccttctgtgcccttcatttctggtaacccctacggtgctttgtttcagaatttgaatgttccaggtgtattcacgggtgactacacagtcttgtgttttccttcagttagaatgatgccctccagtttcactgtcacatgtctctttgaatcctgacagccatcattttactcatggacatggacacttccggtccttccacctttggctcatttgagtagcggcagtgcaggatggttgttaactctgattttagctataatttcatctgtaacttgtctttacctgcctgttttagtctctgtatttcagaaaataggtttatatcctttggcattacaactgctcaggtagtgatacatgaagccagtgctgtgtgggagatttacttgctggtttctcctcttggttattttcaatccatgggaataattaaatagtgataagttagaggagcagaaaactaaactttgcttcaaaaatacgttaactttggaatctttcagtacttgctaaagaggctgcacgttgtgtgtctgcattaaatgttgtgatgactttcagtttagatagtaatgattgggaagaatagtcacagggtctgtgacccggctcattgagtcaggcacctgtctcctgacacctgagttcaatctctggattccctgggagaagtatagaacctaactgcaggttgtcctgacttttaggagtgttccagaagcatgcctcctgcatacacattgtgcttagtggtagccatagatgctcagaagcatggagtagctatgtagctgatctttcctcaagtcctccctgtatggcagaaacagtacacttaggtcacattttaattaccacaggtcaattttttgtactttacttattattttttataccattttttccaagggaaaataaattttgggtttgtatggtagataatacagcgacattcaggagtataatcataggagtataatttttagaaaattaactacaaattttgtcactaagaaatcatgttttgaatttgttgcaaaatagttacctttgttaacgtctataaaaggagcactctttctttattctcctgaaattgatggttgtctgtggatggacacatgcatgtaatgtgcacatgtgagtatgaaagcttgtgtacatgcagagaccctgacacatggagtgtgccttgacctgctcctgtgtggtgagctgtgtggtgatgtcctccctgcacttgcttttccctccaattcccccctgggtccccctgggtccccagtctgtgactcatctgacattgtcagttcttcctactcctttgtagtccataggctttttttttttaattgtgcctccttttgcagagaatccatggagctgaataagctgaataaggttgtttgtgtgtttgccatcgattcagtcctttgctgcagattcagaaggctcttgaagtgtcagtcactagttctgtgagttccaccaactgactggaagctgctgcttaggatggcatgtatttctcgcgtgggcagaccgtcacacatagtgtcagcatcgtgtctgtgatagtagttgcctgcagtcaggctgtgttatgcagctgttttatacactgtgggtggcacagttttaagaggcaaaagtctgttcactttctgcttttgaccgtacagatataagttgtgtagaaggcgaggtgggaggcacaaaccttgaggactgtcctttccaatagggcctctgagctccttgcaactctgtacagaccacattagaactcagtgaccatcaaaggaaaaacaagtggtccagatagatgctttaatccaaattagctccttcaaaacagcttataaagagggcagactaaactgtctgtcaccggccagccctgcagaaggaataatgggaactggaccagcagatgctgaagcaagtgacttagatgtggttccttcgcatctggagctatttgcatacaaagccaacaggaaagttcaaacattcctcttaagaccttggcagaggggaacctggaagacagatgcctttttgatttcatggttcagtctttccgttctccattctcctggccaggaaagcctaggacagctaacggtcatttattaatcaccacacctctcactactacccccattttccagggggatctgtgtgacgcacctcgagggctcaggacccgagtccaaacactgttttatgtgagattgtatgtttacatgtggtagtgaaaaaccacaagattcattgatctgatccgcatctgtggtaagattggaaagtgccttcctacacactcacatacctgtgctttacaggcagtgtgactggctggcatgtgaaggcattttaaagagacactgagccttttagtctgaccatgagaatgatgaaataatagactctgtttcccaggattttcatgctgagaggagagaaaagggggtggggttgtttcctggaatgagatttcacagttctaacaacttgtcagaccacctgacagatgaaactggagtccagatagttgcaggcagtcctggacagagccacaccttgaccaggactgcagagatgtgcattttgccctgttgttaaactttgcccttcttccaaatgtggtcctgtcaaataaatccctcttttctgctttatacttttagtttggctcttttaattgactgactgatgatgaccatctggacctgacttggaagggctggttttgacccccagattggatggcagtagagtgataacatttaaaactttctctgctccctgtctactatccatttagacaccttattaggtcggacactgggttttactattgtgtgtgtatgtgtgtgtgtgatgcttacatgaatgtcagagtaccgcatacgtttgtggtacctgtgcaggcaaggaggaacctttagatctcttgggactggagttataaagagtcatgtgggtgctgggaattgagcctctggaagagcagccagggctctcaaaactctgtgtcttctccctagccctggggtgtcatattgtagcactatgattttactgtttgagtgaaggttttcatgtagcttccttttgctacttcatgcattttcttctcaggccaaggctgttcaccaccctttctgcttttgatggtcatggccagtttctttaaatcacactaaggatttagtaggattctgtagagctgtgagttgctgctaaagtcaaactggtgttgttgctttctctagctatgaaaaacaccacaactaaaaggaacttggggagagaaaggttgtttggcttatggtgatagcccatcaccgagagaagacagggcatgagcttgaggcagggactgaaacagagatggaggaggaaaggtgcttactgacttgctcccaagagttcaggttctctttagcagaatagggctggcaccgcccacagtgggctgagtcgtcctgcatccattagcaattaagaaaatgccttacagccctgttttatatattgtaattttcacatttggtctaaagtttctgttatggattccagagaccaggactagccattgcagtagacagaagaatgtcccttctctttgttcccagcatgcaagcctaactatctataggagcagtaagttttctgtagtgggaattcttaaggcataagttggaaaggagaggacgaggtgaggctggctggctggcgttatctctggcagaggctcccggcttagacttcagggcctgtgatagttctttattgtctgttcgacacatatggaatgaagtataatccagaaataacacctgtgaggtatgcatgcatgcatgtatgtatgtatgtatgtatgtatgtatgtatgttgcttgttttgaagtgagcagatccatttctagtcaagacctttgtggtaggaagatacacacttgtaatccatatcttgagacaggaagactttaatctgggccacatcttgagctgggagcctacataaagacatggaagagggaagcttttgctctctgcctgtttgctctccgctttgctagcaagtccattccttcactggcattagaacctactgctttaggttctagtgtccactgaagttcagaggagacatccagcctcgtgggctgggcaactactagactcttatcttaggctttctgtttacagccacccgttgttggattagctggacctcagcctgtaagtcattctaataaaccccacatatgttttcttcttttcataagtgctgcttctctagagaaccctgacaaatacagggtcccgactggttattgttgtccttcacatgtcatccttgctgatgtgggtttaagtcaactctcactttgtgctgcagagttacgtttcaggttcttctttgtctgtctcggaggtctgtgtgatttcagagtatcagagcttgctatctgctcgtctatacttctggcctttccactggagagttggctttatttcttgagcttctggaatcctgtaatccctccatgtctctttagtctagttatctgtcccgcatcctgtgtctcctccgtggttaatctgtcgcacaccctgtctgctctgtggctgcccagcaacccatcaatatatcagccaaatgtgagatgagcctttctgctcttctccacttctggttatgcctgagcaaagccaccaccatgctgtgagcatgctcacttcttgtgcttgctttagtctctagttagaacccagctggctgggtcagagctgttagtgtatttgttgtttgtggaatttgattttaaagtttttttttttctctcattttttgtggattctaaaatattgaagtataaaacatctactttgctatgattttggtgattctaatttgacctatttttatgatacctctctgagtgttttagtaacctctgcagtgtattgcaggcttgtacctataattaccatgttcttctgaataaatcatatgaactgtgcagttacaaaatctcacttgatttgagtattgctgttaggcttggtagaagccttttaatctcacttctgacttctgtattgatttacttgattctcctgccttgcagctaatacatagtttttttggttattaaagcatggctggtgtgaagaggtcgttctttaacgtaacctctgaagtcgggtctggtggtgcaggtctataatcccagctgctccagagggcgaggaaggagtgttggttagttcaaggccaccctaagctacttaagtgagaccctgtctcaaaataaaaagtggaaagagggctgggcatgtatcccagtgctgggtgctggccaagcctgtgtaaggagcccagttcagttcccagcactgaaagctcccttcctcttgattaacatggaaaatattttgaggtttttgttttgttttggtgagtgtagtgaaggctagttttattgtctacaacttcagatagattgttttggactatgccaagaaattttaggataaacaacacagaaactgcctaatatactaagaaagtagaacagaaatgtgtgtgtgtgtgtgtgagtgtgtgtgtgtgagagtgtgtgagtgagagagtgtgtgtatgtgtgtatgtgagagtgtgtatgtgtgtgagtgtgtgtatgtgtgtgagtgtgtgtgtgtgagagagtgtgtgtgtatgtgtgagtgtgtgagtgagagtgtgtgagtgtgtatgtgtgtgagtatgtgtgtgtgtgagtgtgtatgtgtgtgagtatgtgtgtgtgtgtgtgagtgtgtgtgagtgtgtgtgtgtgtgagagagagagtgtgtgtttatgaactgtggagaaatagtgaaaactttacctaggcttagttttgcagaagtgttttactactgtgaagctttagccattttgtacctgaatatcagtaaagaagttattcctggcagtgtggcatgnnnnnnnnnnnnnnnnnnnnnnnnnnnnnnnnnnnnnnnnnnnnnnnnnnnnnnnnnnnnnnnnnnnnnnnnnnnnnnnnnnnnnnnnnnnnnnnnnnnnnnnnnnnnnnnnnnnnnnnnnnnnnnnnnnnnnnnnnnnnnnnnnnnnnnnnnnnnnnnnnnnnnnnnnnnnnnnnnnnnnnnnnnnnnnnnnnnnnnnnnnnnnnnnnnnnnnnnnnnnnnnnnnnnnnnnnnnnnnnnnnnnnnnnnnnnnnnnnnnnnnnnnnnnnnnnnnnnnnnnnnnnnnnnnnnnnnnnnnnnnnnnnnnnnnnnnnnnnnnnnnnnnnnnnnnnnnnnnnnnnnnnnnnnnnnnnnnnnnnnnnnnnnnnnnnnnnnnnnnnnnnnnnnnnnnnnnnnnnnnnnnnnnnnnnnnnnnnnnnnnnnnnnnnnnnnnnnnnnnnnnnnnnnnnnnnnnnnnnnnnnnnnnnnnnnnnnnnnnnnnnnnnnnnnnnnnnnnnnnnnnnnnnnnnnnnnnnnnnnnnnnnnnnnnnnnnnnnnnnnnnnnnnnnnnnnnnnnnnnnnnnnnnnnnnnnnnnnnnnnnnnnnnnnnnnnnnnnnnnnnntctccccattgctttagattcttgccatttatccgccaatttgaagcagggtgccccacatttaatctaggttgtgttaagcccaggaggatggtgaggaacagaataaaaattctgtctgccttatgccatgtctgtgctagtaaaatagctcaaactaaatggtcacagagatcctgctgggttggaactagtggtcctttcaaggaccagggaagcccgtcagaggacaagacagagtgagggtgagtaggtgaagccctgttgctgagtgtcacccagacacagccatctatctgtcagtcaccgatttcctgtcatcatttaatctgaggtgaaactggcccattgaggtatttctatgtttcttttcatctctgctgttccccccacccctggcctctgctgtcctctccacctccatccatgctgtctctcccctccctctcatcctcactgtcccctcctgtcctcatgtctcacattgtccactcttggaatttagtgggaagtgtttcctgcctccatccccaggtctgtcttctatgcccttctcccctcgcccctttcctgacagtgcctgctggctgtaggacaggctctcactgctctgcgtttagctcacgttcatcttgaggtccgtgggcatgaagcaagtgtgtggccaggccctacactgttctttacccacacaagagcctggcaatcaggctgaggtttacagagttgggtaaattttacttatctctattaattcctttacttcccttctgcttgaatgttttctatttagtttcatcagtgttcagtttggctgactgaattgctttctgtaagtggtacctagtgtcctatttgctggaaagagaaaatttgaagttaactaaaataaggggaataaaatcaaaccctctctcttttagttttctaacagttagttttgttgaaagtgacaaaatgttgctgtggaaaatgacgtgacattagagtccgggtgtgagtctcctgccaagtcaccgtgtgccagagagtaaggttgtggccgaaggacacccctggcctccatagaaaccatgtcagctctgaactttgtctctgtaactccttccatgggtattttgttccccattctaagaaggaacaaagtatccatactttggtcttccttcttcttgagtttcatgtgttttgtaaattgtatcttgggtattctaagtttctgggctaatatccagttatcagtgagtgcatatcatgtgtgttcttttgtgattgggttacctcactcaggatgatatcttccagatctatccatttgcctaagaatttcataaattcattgtttttaattgctgggtagtaccccattgtgtaaatgtaccacattttctttatctattcctctcttgaggggcatctgggtttttttctagcttctggctattataaataaggctgctatgaacatagtataacatgtgtccttattacaagttggaacacctgatgggtatatgcccaggagtggtattgctggatcttccagtagtactatgtgcaattttctgaggaaccaccaaactgatttccagatttgttgtagcagtttgcaatcccaccagccatgagctgagactgaaggaaggaccagccagagactgccccacctggggatccatcccataagcaaccaccaaacccagacactattgcatatgccaacaagatattgctgacaggatcctgatatagctgtctcctgtgaggctatgccagtgcctagtaaatatagaggttgatgctcacagtcatctattgcatggagcacagggtacccaatgaaggagcttaagtaagtacccaaggagcagaaggggtctgcaaccctataagaggaacaacaatatgaactaaccagtacccccagagcttatgtctctagctgcatatgtcgcagaggatggcctagttggccatcaatgggaggaaaggccgttggtcttgcgaagatcatatgccccagcataggggaatgccagggccaggaagcagggagtgggtgggttggggagcaggggaggggagggtataggggatttttagagaggaatctaggaaaagtttgaaatgtaaatgaagaaaatacctagttaaaaaaaaagaaagaaaagaaaccatgttggtagatgaccagagagtaaggtcatagctggaagacacccctagcctccatagaaaccatgtggatggatggccagagagtaaggtcatggctggaggacacccttggcctacatagaaaccatgtagatggatgagttccagaactctggactgtgcagattgccagtcacatctcttggttgtgtttaagaatgtttcatctgcatggaacagggatatcagaccctgtttaaagtgatggtattgtaggcatttgccttctctgttttgaagaagaggtgttgttgctcacaagaatcctacttagaatctctatcttgaagtcagcttggctttcatcatgtgtaaatcagagatgcactattttctgtaaaatcttaatataaagcaaaataagcagacacttgtgtcatggctacatggggaacacagttcttgtcttccatagtgcagaggacaccatggtgtgaatgtagttcccgtgttctgtatggaggaggacaccttggttttaatgaacttcccatgttctatatggaggaggacaccttggtatgaatgaagttcctgtgttctaggacaccatggtgtgaataaagttcccgtgttctgtatggaggaggacaccttggtgtgaatgaagttcccatgttctgtagtgtggaggacaccatggtgtgaacacagtttcttccatagtgaggaggacaccttggtgtgaatgcaatttctgtcttctgtagtgaggacaccacggtgtgaacaaagttcctgtgttctgtggtgagaaggacaccgtgttgtgaacacagttcttgtcttctataacctaattttagttttctggacaacttaattttaatttttataaatggatacatactcagagtttgaaagtacagaaatttaactggtcacatttatttaggaaagctgttcattttcctgcctgttaaaaatgccagataagacttttttgtagtataacaacttaagtagcccagtctgctataagcctttctgtgtggattgaaatttatatgtacatttacattttaaaggtcaatgtgcatctcttacatgtatcatttaaagaaatttcagcttttgttttagaattttaattttataattatgttttacttaagtgctaagattgactggaaattcactttcagagatacatgtcaattgcccttacgctaattaaggctgtattttgcaagcctgtaactcatagtggtagctcttcttatttggtaagtagtattaacatttctatgtgagtccttacacagtggatattagaattaattaatgttttcaaattggaaaaaacagtttcaaaaatatattgttacacgactgagccccaaagcttctcctccccgtagtaatcaagcccctgtgcattctaccctggacttttttgccatcagacctgctttatttatacatttgtgttttctggtgtgaggggtgcactcagtgtcacacgtgttgttctgatggcttagatatgtgcatttaggcccccagcacagtcttgacatcttgttgcatgtggtttcttgttctggctttctccccttctggaatgttctccatttctgcaagtgcacatcacttttctgtagtcacaagtctactcagcatctcctttccattgagcctccccatttccattcccctatgtccatcccccatgctcatgtccccaacgcctgcctcctagcctccttgtgtgtacagtcaaaggtggctcttgctgcctcttgtccctgatttccctgttgaattttgcactgtcagctgagttgtacttaacactgcacataccttacttctttgtaccccccagctcctctactttactactccctttcttctattcttgaagaactgtcttagagctgtcttatagctttaattttttccagtcctacttttaatgatggttcttaaatatttcaacctcccttttagcccagtacctaccagaggtaatgaaagagacagaatacagagtaaatggacctgtttagaaatggttctttggagcaattcctgtctgtgttgtctggaaagtggcaggtcagtagttcacaggagtcagcagcaacagctcgatccacttgcaaacactgtatggagacactagcagtccagttcagtacagtcaggatagcaacataaatcagcataaatcactacctagcagagacagccaggcctcagccttggcacaagcagcaggagggacccggaggaatgccaggagaaattcttggttgagtctctctcaacaaagagatcagtgaagataagaccaacaagcatcgcacagctagttctataagccagccacgctctgcttccatcactgtccatcaagctttatttatactctctctgaacatcacatatcctccatgggtctttcctcagcacgtgcatcttgtctcactgacatcactctgccaattagccaactccacagaagcaaacattaagaaactgcagcaaacactccttcatgtgtttgccccaagaaaacaccatccaacacaactgactttccaaaggacccttaagttttcacttcactgtcttttagagggtttctttctctcacttttttacatctatcgtgtcatccatgtatcatctgtctgtctattatctacatatcatctttctatttatctaccttcctatcatccatctataatctacctatcacctatcatctgtctgtctgtctgcctgtcaatctacctatatctgttgtcttacctatcatctattatctctattatcagtcatctatcatccatcatctgtctgtctgtctacctatctttatcctgtatctctgacatcttatttatttatatatttatttattatatgtgcttgtttctatgtgcacacgccatagtgcatatgggtgtcagaggatagcttgtgagagccagttctttccttgtactatcaaactcagctcatcacacttaggcaggcttttttatctgctgagccttttcacccaccatcctgaccgtctttagcaaattgccacatatggcacctcaagagctcttgggcttgcatatgaagtagtaggttcctgtaaagagaagttaattgctggtcatagactctcacaagaattcatgaagtatctgacctggcactggacacattggataataatcagattgtcctgtgtgtttcctagtccctgggtgtcagtaggaactctctggttccagtcatagctataggagagaaatcgaaaatcttccacagtcatggctgcattcacctccctttcagctcttggaatgattgtataacgagaagtttctctacagcaaacctctatttactagagcagtggctctcctcctttctaacgctgtggccctttaacacaggtcctcatgttgtggtgacctcaccccccccccccatgaaattattttgctgctacttcctaactgtaattttgctactgttgtgaattatagtgtaaatatttgatattcaggatatctgatatgtgacccctaagggtatcatggcacgggttgagaatcactgtactaaaaacatctagaacagttgtctgttatatgatacacttccagctacagacaggtcttcggtacattggtagaatattgcttgatcaatgactgtaagagcttctgctttcttctctctataaacctttgtgatgctggaaggaaaagctctcttctttgctaactctttgagcacatatatatgtgtgtgtgcttatatttttgtactatatatatatatatatatatatatatatatatatacacacacatatatatacatatatatacacaaacatgtacacccatagatacacagatgtatttgtatggtcatttctacactctcatctacaccagagttcacaaccttcccagttctatgacccttgaatacagttcctcatgttgtggtgacctccaactattacattattttcatcgttacttcatacctacatttttgctactgttatgaattacaatataaatatctgatgtgcaggatatctgataaacaacccccaaaagggtcatggcccacagattggtctgaaatactacacactctaccctattcagacttttactcaccagcttagttgtgttgttaggaagatagagttgagtgtagggatatatatatatatatatatatatatatatatatatataaatatatatatatatatgtgtgtgtgtgtgtgtgtgtgtgtgtgtgtgtgtgtctttctgagcatatatatatgttttttgaggcagtaaatctccaaatgtatttcttttaaagagatatttcaagaaacttatgcagaaaacttacataggaaagacaactgaaagccgttagaggatgtcttttaggagaaataattagatggcgtgttctgttattatttggggatcaccattataaatagatttaaatatctagcttctttatattctcataacctgagtccaccaaccatccctcttggctgtcagacattcaaaatcagtcctctctgaaaagccatacagggtgctggataacttagattcactcccccatatctttgttataggaatgatgcttccaatggtaaaaatgacctctgtgagtaaatcccatgcagaacctgggatgtgattgagttacaatgtatccattgaagccagctttagcttttctgagttaggctctttttcctgtgtcttttctggagatacaccaatacttgtgtaagtaattgttccaagaccctcactcttgggtgtgtgactggcttctaagtctcaagggcctcctgctcacacacaaatagcctgattctttgtacatgaactatgtggcttgcatagagaacaaagaacagctttaaattgctagagagaaactttgacattcttgccagtgtctctctgtctttctgagcaagtcttgtatagcagttttgaggttatgtccagtgtcaagttggagacaaaagattgcagagtccccaattgacttttctttcttcacatggccggctgccccctctggctgcttctttccattcacatgatacaatactgcttcgttccagtacagggcttgaacctcagaccttacatgtgctaagtaaacactgtcctaagccactgcttgggtccatggagtcattcctggaggttctgtttctcagtgtgcattcagtccatccagaaactttgttcacagcctttgaagtttgactgttggacttctcagaaagttctcctcttactatgctgatttgggttgctgtcttctcttgggtagattatggagaagcctacaaaccagcagaactccccccacagtgatgccttttcaataaattatcttgcctgctcacagtcccaaattagctaatagaaaatttccatattttttcccagatggcatgaaattagtttctcagacagagccctggatctgcagggtgctctccccagctcacgttcttccagcgcagttcttctgctatgctcctttctcagctgcctttccagtcagcttctgcttgatgcctggtatctcacatggagagaaagagcaagtaactagcattcatgccttattgttctcccacagtgaccaggctaggttggctctctattatccttctacctctttccttccccatctgcctttgcttttctgtctcagcatttacttattgtgacttttttacactgaaggtgtacagagtcaggactgtgtctcagtgtagtatgcagctctgctcccacctcagggtatattgagggtgtcctattcaccttcagctctcaacgtgacacacttgggtaaaggaaacctcagatgggaaattctctgcatcagattctcctgtgggtgtgtctgagggagggcctagcccattgtgggttgtaccatttctgagtaggtgccctaaactgatgaagcctgaggtagggcaagtcagtgagcagtgttctccagttcttcgtgggcttgcttcagtccctgcctgtggttcctgtcttgagatcctgccttggcatcctggactgtggcctgtaacccaagcaaccctttcctccccaggttgcttttggtcatggggttatcacagcatcagaggaaaccaggacactcattcagcctggttagtttaccttttgctctttgcaatctgttttagggttcaatgtcccgatttcctgctaattaattacatattttttatactgagtgtgtgaagtgttactgaggttcaaaagtccctaaagccaatgctgagcgacgagactcacatcctcctcctgtcttcccacagaattctctcctgtctgcccatcaggcccatcagtctctgcttctttctcctgcctactctttgccaacagctctaaagtcatctgttgtgtttcatctcatttgctcagtctatactttaaagaatctttgaaagtttttgcccagttttaacttctttacgtattagggatattaggctttatctgtggtgtgcttgcatgtttctttttctaacccagcaattgttgctgtttgaggcaataacgtgacatgaggaaaacaactttttatcttttctacgttattttattttgtatatatatttttatcttttgtatatttttgtaatcatctagtttttttttaaaataactggacactaggatctttttattgtatctgacgtcacaacctcagccctgttttagtcttatattttatatgttcttgtttttaaaacttttattttatttataaagaatcttttgtctacaagcttttataaatacttaaaaatacactcatttgtgcgtgtatgtacatatgtatatatatgtgtgtatgtatgtatgtgtatgcatatatgtgtgtatgcatttttatgcttgtgtgtatatacgtgttcgtgtgtgtgtgtgtgtgtgtgtgtgtgtgtgtgtgtgtgtagttcagcgggaccttggaagagtttgttttcaccttctatcatatctgtgctagggactgaactcaggcagacaggcttggtagtgggtactctcctctgtgccaccctgcaggcatggtttttactgtcttttcaagtttagttccgaatgatgcattcatatgaataaggttttcatttcagtatactggagttatatagcttttgctattgtatgaaaaagccttatgatgtcattggagatttatgtttgtgaggttattgtctggtggcttggttcccccaaaggaattcctcaagagacctgttttaaagtactaactaaatcatctttacaaactgtgtttctgtaagcacttgcaattttaatgaaaaatttaaaattaattacttaaaagtctaaagacttaaaacaagggacatttcctatttttaagctgtgttcattgctatttaattgtgtatatttgtatattgcccatattatcagattagctgctattgtgaatctagaattttaaaggttagaccaaacttattagtcttcttcaatatctgtattattcttttcagttcccatatcctattctaatttttcttttccatttctttagtttgatctgggaaatgaattaatttctatagaaggtcctagaaaaaatgtatatgtgtatatatgtatatatctgagtgtgtgtgtatgtgtgtaagcatatgtatatgtatgtatacacatctaccttgtagtgcatgtcacaaagttttgtatgtaattttttttttttcgagacagggtttctctgtgtagccctggctgtcctggaactcactctgtagaccaggctggcctcgcactcagaaatccacctgcctttgcctcccaagtgctggaattaaaggtgtgcaccaccactgcccggcgatatgtaatattttaaggtcattatttcttacacactcaataatattcttaactaaaagcaagtaattggaattccattgtggttaagtggtaaaggagacaggtgggatgatcctggaaaagctggttttcagtgccctggtaagtgtcctcacttccggtcactgctctgctcactcagcacaccctgcacctctgcggtaagtgctgcatctgccagcttagttcagcattcgaatgtccatctgaggtgtttaaggcacatgctatttccctgcttctgtaagaggacgatgtgactatgaaaagctcaagtcatttgctgaagtctgtatgacagggaagtgagtgttcttcacactgcaagccccgtctgagctccagggttggcttgtgtctgggcagtggcactgtgatgtcatagaggcactgcacagtgtggcaaaggtttggatgtgagcagcacagggagactgggtgagatatcactggctcggcagatccagggttcagttaatgggagtgaaacatgaggccagtctgagctgtgtgaagtgatagttagccataatgtgcctgtgggacatctaaatggatccttgtggtaatcaggtgagcatgtggtgctagagggttagggagaacttgatgctcatgatgggaacttggttgttattgctctgtgggtttgaaagtagttggggaaatggaagactaagagtatacttgcagaagtcaggagagtgatgtgagtgttcatcaatggactgctgcaggggactggccctgatgggtgtgaggaaggtggagatggacaaagactgctgaggaagtgtggatatgaagggtggtagtacctgtttgagggccaggccctcctccttcctcctgttttctacctgtaacctcctctccccacttgcttttttaccttcctctccnnnnnnnnnnnnnnnnnnnntttgtacatgaactatgtggcttgcatagaggaacaaagaacagctttaaattgctagagagaaactttgacattcttgccagtgtctctctgtctttctgagcaagtcttgtatagcagttttgaggttatgtccagtgtcaagttggagacaaaagattgcagagtccccaattgacttttctttcttcacatggccggctgccccctctggctgcttctttccattcacatgatacaatactgcttcgttccagtacagggcttgaacctcagaccttacatgtgctaagtaaacactgtcctaagccactgcttgggtccatggagtcattcctggaggttctgtttctcagtgtgcattcagtccatccagaaactttgttcacagcctttgaagtttgactgttggacttctcagaaagttctcctcttactgtgctgatttgggttgctgtcttctcttgggtagattatggagaagcctacaaaccagcagaactcccccacagtgatgccttttcaataaattatcttgcctgctcacagtcccaaattagctaatagaaaatttccatattttttcccagatggcatgaaattagtttctcagacagagccctggatctgcagggtgctctccccagctcacgttcttccagcgcagttcttctgctatgctcctttctcagctgcctttccagtcagcttctgcttgatgcctggtatctcacatggagagaaagagcaagtaactagcattcatgccttattgttctcccacagtgaccaggctaggttggctctctattatccttctacctctttccttccccatctgcctttgcttttctgtctcagcatttatttattgtgacttttttacacccaacatctgtcagcttagttcagcattcgaatgtccatctgaggtgtttaaggcacatgctatttccctgcttctgtaagaggacgatgtgactatgaaaagctcaagtcatttgctgaagtctgtatgacagggaagtgagtgttgttcatactgcaagccccttctgagctccagggttggcttgtgtctgggcagtggcactgtgatgtcatagaggcactgcccagtgtggcaaaggtttggatgtgagcagcacagggagactgggtgagatatcactggctcggcagatccagggttcagttaatgggagtgaaacatgaggccagtctgagctgtgtgaagtgatagttagccataatgtgcctgtgggacatctaaatggatccttgtggtaatcaggtgagcatgtggtgctagagggttagggagaacttgatgctcatgatgggaacttggttgttattgctctgtgggtttgaaagtagttggggaaatggaagactaagagtatacttgcagaagtcaggagagtgatgtgagtgttcatcaatggactgctgcaggggactggccctgatgggtgtgaggaaggtggagatggacaaagactgctgaggaagtgtggatatgaagggtggtagtacctgtttgagggccaggccctcctccttcctcctgttttctcctgtaacctcctctctccacttgcttttttaccttcctctcccatcctgtcctgtcctttagctttcctgcctattgtcctttctcctcttcttcatgtgatgcactttgaatattcagtgtttggagaatttcacttaagaatccatggcatcttgttttaaatcatggctgttgatgtgaatgacatagatactgaaatcctcaggcatttaggctgtcttacctagggcttctattgctatgatgaaacaccatgaccaaaagcaacttggggaggaaagggtttatttcaatttacagatccttagcacagtccaccactgaagaaagtcaaggcaggaatgcaagcagggcaggaacctgggatcaggagatcatgagagtccctggaagagtgctgcttagtgaattgtcctggcacactcctcctcttttcttatgccaccaggatcaccaaacaggaatatgtacctcaggcttgcccagagtgcaacttggtggagctatcttctcaactgaggttctgtcttcccaaatgactacagttggtgtcaagttgacatacaagggtggtacagtttagaattcattctgaaataataaccagtgtgccaagtgctgacacagacctgcttcgtcagcttcgtgtgcttcagagaagacactgaagggtaggcttcagtgttccaagcttggtataacattgaggtgctaggcccagctctcagttgtgaggtgggctcctccttcttggacaggatttttgttcatgtcatagagagttcactaatatgcttgttaatcagttacagaattagaaattgaaatatgttgacatttttagataattcactttatctatagagaagatttggaaaaaaatatatgccaagttcaaacttgaataaaagtttttctttttgtatttgagatgaaaaaaattgaaatgcctctttgtatttcagttaaaaattgaaagacacatacacatatacacagaagtacacagagacatgtatacacacatacatgcacacatatatacacacatatgcacacacagacaaaggcatgcaaacacacatactgaggcacacacacatatacacacatgtacatgcacacagaggtacataggcacacatgcttgtgtatactaatttacatttagaaataagttcatcctgcagctaaatgatttcctttcttttaagttaattttattttgagaatttcatgtttgattactatatttatattatttttatccctgttgtcccatgtgtaacatactcttaaaaagtacattgttacccatgtataacatacatgtacaatattgttagatataataaaatgctacataattaagcaggtccttaaagtagtgatcagaaatctgtacatttagttcattagtatttactagccttatacgtgtctttcttcagggtaacacgcagtctccattgtgagccatcttcagagtttgtggtaggaccccgcggacagagctactgatgccaatgtggaataaaggtcattgcagttaggctgctgtgtgtgtgaatgagttgactattgaagatgactccttacatttcaaacatattagattcacttgaacttttggaagcatttaaaaataaactaatataaatatgtttttcctcatttgtatttttgtctctcttgtcctagccaattagctgcttccacacctcctaatgtgaaccttaatcacagtataacaaggttcattatgaaaataatagcaaaattgtctcacagcattgcttttgtggaaataatccagtaagtgaagtttgtctttataattgaaactttaacaaaattattataaaagaggacattccaggtttctacagcagtcctcccttctccttcgtgttgctataatgaatagtttagctgttcaactctgtgctagtgagtggatgtgtcttaagttgaatgtttgctctggtagaagcaagcctctctagtagactcggccaatttgtgtgttaggatgttagaatgtgtttgtctttaacacacatggacgcatcttgtatgtgtaattcagaaacactccttttagagtgttttcaccctccctgctctaagtgttacaccccctcctatccacctaacctgtctctgtctcgtcttctaacctttcccttgtgctctgtcttcagtatccggagtgcgactctcaccagcttctccggagcttatcctggaccatgaccactcatctccatccactggccacctccctccagatgctgtcattacctcagcagatgatacgcatgcagatagcagcctcatgagtcagaccatctccaaggctcaggtgagcacaggcatgtctcaggaggagcacagaggctgcatgctgacttaattcatgctctatgaccttttaaaataagaattcccaaagaaacatttctgtaagtatatttctgtgaaatgattgcaaaagatttaagtacctcagttgcaaaagtttgctgtgagtgtctcattcaatagaattgactaattactcaggcctgaggctccagttagaatatccagaggacactaggttcaaaaaaagaaagctaggtagcaggactcattccataaacctgtgatgagctaaggactgatagagctcagagcttcctgtgtcagcgtgactgtcaacccatcctgaaagccatcttcggaccactgagactcctgagagggaccagcagtccagaatgcatagagctcttgcagaggactggagtttggttcagcactcacattgagcagctccaggggatctattccctctggcctctgctgccacccacgcacatgtgcacacatctgcacatagacaacaaataagggaaaacaaatgtgtcattgcttccccctgttcaaaggcgaggaagccaaagcacacattgctgacagagacagaactgggttctgctggggaaactgaggcacagttgatgctgtttctgtcatcccaatactttactgtggtaaacagctgtgtggttgttaaaatgcacttagctttgctcatgaaatcttggacttaaaggagaataataacaaaacagaataatttttttcattttaaacatgatttccaagttaaactttaagtagggagataattattgagaatagtttttctttttttggagtattaatgtgtttttaggtataagaacatctatttcagttttagagcagaagccccagacagcaccatcatagtgtattcattcagatatttgcagagacctttgcacgatgtcagccagataccttgccaagtgcggtgctatgtgaccttttaattttgctagaagttaataagttagcatcattaataaatgtgagattctgagctgcagtttaattgtaaatgcatccttagtctgtgtattcacgtcagagtaggtgcatctcagatgcatttgtgcgcgatggggcctattttccacaaggttaagtgtttagtgtgttaacagtcacacagtacagacataagaggctttttcttaaggcttcaaagaccagcctgttgtcaaagtctgaagtcgtttgttgattggcttagagtagaataatttcattgctttactacaacttaactccaaatgtggcttctgaaactcattggatgtttccttagtggatcagcctaactcttctctgtcgggtctgtgttttgttaacatggtttagattcagcagtcagcgcacacacatctgaacatccctctcttcccacttggtttaacggatgagccgagccatggagcacttgccctggaggatgagcctgaaggtcctggagtccacgtgtccaactctcagctccggcaaaaaatatcaagtctggagactaaactcaaagcttctgaagaagaaaagcagagaattaaaaaggtgtgtgtgcattggcctgagaatgaaaaattgcatatgctagcaatttgatataatccaaatggatggaaagtccccaggagcataggttctggtcagtcacaccacacaggcggtggaggcattttgttagaagcctccagtcgtgggctggagaggtggctcagagagtgggagcactggcctttcttgccagcagaccatttctggttcccagaacccacatggcagctcataactgtctgcaactctagttccatggctccttgtggcctccaagtgttgctgtttgcatgtagtaaaatacatacatttaggcacacacacataatacataaataaactgaacctcaaacaaaagtctgtagtcagtggttagcatatccatgcattcagcatctaattcaaccaaccatatatcagaagtactcagagatacatgttgtatatgttgtaggtatatgttcacggagtccccatttccacaaacgaaactatttaacttatattcctgttgtgtacatattttaaatagctggagacaatttagtgtatgtggtaggatacataggttatatgaaaacattgtgctatttttagacccctgggactttggtgtcatcgggggctggtatgaaccaaagtctgtgtgtcctgttaagtttttggttttttttttgttttttggttttttaagcaggttttgatggggatttttattgtctcctgctcctccaaggctttcatttctgttttgtcttcatttattttcaaagcaagcagtattatactgcatgtgtgatttcagatttggcatgtgggaaattagatgcccatgtgcgtgttccagcacaccttttcagggacgacactagcatgtgctctcagctctcctctgtccttctatctgtctgtctgtccatctatcacgaatcttctatcacttgtcatctctcagttatcatctatatatatccatcagtgttatcttctctctatatccatcggtgtctttgttgtctgtctctttgtccacccatttgtgtgtctgtataagccagttcatggaaaggacttatggaggttggttgatatgctcctggtctttattcattgttttgtgtttgtagtacctatatatataggtatgtgcatgtagcaggacgtgccccctgcatgtaggaggacgtgcccatgtgctgtcttgtggagagtgtcagaatgctttcatctctcactccgcactcagtctactctgacctagggctggtggctggcccttgggctccgtggacagccctttctctgtgtttttgtgctggagttacacacttggcttttatgagggtgtgtagggagccggcactctggtcctcatatttgcacggcaagcattttaccctccagctgcctctccagcctgttcttgttcatttaaaattttagtgttctgtcaatattccatattggcctagaaattagttagcttagacattcagccattttacctgatttccttccctgataaatactttctgtttattgaaaaagtactttgtgctgtggaacagtgtagagcttgtgtttggtttccttgtaggatgtggagtcactgatggagaaacacagtgtcctggagaaaggcttcttgaaggaaaaggagcaggatgctgtatcctttcaagccagataccgtgagcttcaggtgagcggccccggaaatgctcggtgatggtcccgagtgagtgtggcacacagtaaagagtgttgtccctgcctctagtctgggatgaactggaaagcggcacgttcagttgtcatcatgttttgtgacactggcgtgagacctcttgaccccagtgttaatatgcaccagcttatggaaggcacttgcaaagcgcagttgggaaacagtctatttttgagggcagtactccacacttaggaagtcactgtaggaagagggacatcaagctgggttgttgtcatttctgtacctggggctcatttctgagtctgttccaggcatccttgagcttaacactcaacttttctgtagagtttgatgtcacggtccctgcctttttacactaatgtattgaatgtgcatttctgaatatgtccagagctaaggaaaaaggagccagtttcctcttttgctagaatgatgagggttggtggagtggaggctggatttctgcagtgtctgcgtaagtaagctactccaggatgtgccagtgacaaatgtgtggattggatgaaaagcacctgtccaaagaaattcccctagtgtgtatagttctaaaataacatgcaagttctggaaaatacagacaatacagagaaagaatcagaattcttactatttaccacaaggaacagtaaaaatattgtcacttgatttcagaacatttggcttttaattttcaaggttgaaaggtcaggatggaatgcatgttagcagagcatttcactgaccagagagagtcatcaaccaatggaatgtacagccttagctaactatttaaaaaagcaagtattgcagagagttttaatttgtgatatgttctcattaccgggttaggtggggaagtgtgaaaatcccaaggcacacagacacttagagagttgtgagagccggcaaacagtgggaacgcttccctttcctgtcctgcgcaggtcatgcagactgagcagagggggcagtgactgcagtggagggagtctgccttccctttcctgtatgcctcccaaggtcttccttctgtgcctcctacagcagtggtgcagagtttgctagcatctcagaaagcacgtcacagtgctttgttcagagacattttgacagaaaaatccagttcctaaggttcatttctaatagctgttggctttggtagccatggccagctcagggcctcttggcctaagccttgaaagaccaagtttgtttgctgtgaccgttccctgatggtgaccaattttcccgtgagcatggagtgggcagtgcttgttctcgtcactggacatcccagttcttccccgttcattctcctataaaagtgcttcctgctgacaggagcttgagtattttctgcttgaaaattaaaagtgttttaaagaacacacccagttatgggaaaatgaagtgtttcaaagactaactttttgtgcatgagtggatttgtgtagccttgtgtacctgtgttctcttcctgaccttaaaaggccgtgtgaagattctttaggggtgggggctattcacagcattaccatggcttaaatatccaagagttggacccttgatttcttggcttgactctgctatggtcacactgtcttgaggtcttcagttaagagtatattaaattggtggtttgatagccccaggccttctatttggtgactcgtgttgtccggaattaaccagttctgaaaacagcacgtgtactgtctgaagagtattgcaggaagtacactgggagcccagccagaagtcctgctgtggtggacctgcctttatagcagggttgtgcttggcaagtttttgtgtcacctggacaatgactccagtcattttagaagaggaaacctcacttgggtcagtactcccacccgacggtactatgggcaagcctatggtatattttcttgcctgatgattgatgtggttgagtccagtccattgtgggtggtaccaccccctgggctcctggttctgggtgatataagaatgtaggttgacacaggaatgtaggagccacgaggaacaggctagtaagcagcaccttcctatggattctgtttcagctctgccttgagggttcctgatttccttcagtgatggactatgatgtaaatggataatcaaaagaaaccctttcccccccaagttgctttaggccatggtgtttattactgtactagaaacctctactaagtctgaaattggtaccagagagtgggccaggagatggttgttgagatagacctgtgtttggggcagagttctgaaagaagtttgctctggagaagccagtatgtgttctgagtctgatgaactgtgtgagaatgtagaaggtactgcagaaagcagtggaggcagtggaggcctggcttgtgaaattcagagtgaaggtcaagagtcccttagaaattctactggagtccaaagctttgaattaagaaccactaaagtgctggacagtgatcaagtatacctttaatcccagcactcgggaggcaggcaggtcttaaggccagcctggtctacagagtgagttccaggacagccaaggctacagagagaaactcttgtctaaaaaacccaaaagaaccactaaagtgaaacctttgccttgctgggacaatcagtactaatctgctaaggccacagaatcagctgtnnnnnnnnnnnnnnnnnnnnnnnnnnnnnnnnnnnnnnnnnnnnnnnnnnnnnnnnnnnnnnnnnnnnnnnnnnnnnccagttccacagcttaaatgcattaaccatgttaaagagcaaagtctctataagataaaattaatgctccagtttgagtctgccttacagttaggtctctgctcggctgattctgtatgaagtctctggcaaacataaatttctactgtatattcatgtcatcatacagtttttggtcttttaattctcagtgctggctgcaggaactttctgacctaataacccaggacatctgaggactggtgctgggttgtaaaggcttgtacaaaaatgtatctaaaaacgacagctttgtactcactgatggaattggagctttactttatatgatgaaagaaatttcaggttgtcctcataatgtatgattccgtaaaatgcagttttcatgtccacagctgcggtgtttgctccaaggatgtttatgtaacccgctggacctctcatgcactctgttgtgtctcacagaaaagtgtcaggtgtgcaggtttttgtacttggtaaatctctttgaaaagtcttcgtgataggttgtttttttttgtgtgtttagcgacatggccacaagaggaaaacgtggacttataatgtggctaagccttgctctcacccagtggtaaaggaacctgttatttttgaaaaacaccagtttacagtctccagggatgtctttgctctgcttctcacttatctgaggttggactctgacctcagccattctagaaccaagccacagacctcagcagtgaacgaagggaccgagtctggggcagagtctcataaaagccttatactctatctagtggctacaccacagaaacctttccctgcaattgcaaagtttcatataaaacagagaaaaaaatatacgcttgtttattgtcagaagagaatggtgagaagtcccacacaagctgggtatctgagaagactttgggaagaggtaggtttttcccagggcagtgtttgcattgtgctcatttgaaggattttaagttgcagacctttctcagttgtgtacactatgacaatagttgaagggatattactgtgtccatattgtgtttgaggtgctctgcctgcttacaccttcagtgctgagaaggctttatgcctcatccaatctgtctgagagaactagggcattatgggtattgtggatcactgctagagcttcattatttaagtcatactgattttgaagtgacttcagatggaatttttccaacctgtggctaaacttgatcttctctttcctaccctgttactttctggaagacttagtagacattagtattcattgtttgactacttctattcctgtgggaagtggaggaaaacctgagtgaagtccagaatgaatgtgcgccgttggccccagttggccatgtctaggacgcaggcctaagatgcgtggaggtgaagtctacgggagatagctgtaaatggagtcattgtaatggctctggaaaagccctcagcagaacctagccacactggcctttgttcctgtacttccacaaatgtgaggtattaatgcttggtatctgagctgcttcttcggtgttccattagactgcacaacaatctaagaaatgaagcagagaagttggttttcaatttcagactctactctagttctccatgtaccctgttcatccattgacgctcaacctggttgacatcagttttaaagtatgatcagaacactatttagttcacagtataaagcaactaagtgaatttacaatatgggtgattttttcctttaatcactttattttatgggtattgtggaacttttttctgcatagtccagaaagggacattggatttcccgggactggagttacacacttctgagctgccatgtgggttctggaaattgactctgggtcctatagaagagtagccagtgctatcaactgctaacctatctcttcagcaccaattttgggatttgtgtgtgtgtgttagaagtattaataatgtttattttattccaagccaatgtatgctattatataacatctttctagaaataatgtatttcctggtagctgtggatacagcacaattaagagccagaggaacagaggtcagtaggactgaccttgcaccagatcccggctggctggagtaatgtctttcacagagtagtgtgcagtgtcagggcagccctcagaactattgaactattgaggctattgcagcctcagcctggctacaactcttcacggaggacatcacctacttcagaatacattgacctttctccctttcttactgtaggttcatggacacttatcccatcgctgcagacccgcccctccacctcgtgtttagttgctctgtagtgtccagcttcctgtcctgttttccgtgtttgtcctttaaccctaaccttgaaccagacaccttctctgacttcatgatttttactttttttttcttttgtacttttctaaaacttctttcccagcaacacagtctataagaatttcaagtagtgtaaaaatccatgcatgagagatgcccatggtctcaaaccttacagtgacactcttgcgactgcagtcagagactgctgattgctcccacgatgtcatccagattcatatgctaacccacacctgagggaagagcctgttttccacatgcttgcctataccaaagatatgtgccagttggagaagtatagatttgttcattttaaatattttattagcttttctaatagtcactgattggtttcgctttctgcatttcccatatctcttctttttgttgttttatcatctccatcttaatggatatggtttacaacgactattctatgtgagggtcatttacacttcttcaggcagtgtgtacatagccggcagtgtttacataacagatggtgtgcaccacttttatgcattcatgcaccattatgttactgctcttccttctcatagtggatgcagatgtctgttgttctgtcctgcactgggtgcatttgtctgttgttctgtgacatcagtggcttggtcactatggttctgacttacctacatttcttacgggctgggtaacacaggtccagttacttttctgtctgatgtctgactggctgctcttacagtggtgttcttaaggaacaccccttcctggtttgctccattttgtgctcacctgtccaacaccctaacatgctaatctttgccatccattctcatttcagctgatgttagtgtgttcatgtagcagggctcttgtgttgcttcagtgaatggcatgctgtgtatttagtgcagccatgtgtccctttttggctgttcttgcctgtatgggttttgtgttttacaaaaccttatttggattttgataagaattgtgttaaattcttaggtttatagatagaaatgttgtggtggtttgtatatgcttggcccagcgaatgacactatttggaggtgtgaccttattggagtagtgtgaccttgttggaggaagtgtgtcactgtgggcacaggctttaagactctcctcctagctgcctggaagctagtcttctcctagctgtcttcaaaacaagaggtagaactcttagctcctccagccccatgcctgcctgatgctaccatgctttcgtcttgatgataatagactggatttctgaacctgtaagccagccccaattaaatgtctttatcatgccttggtcatggtatctgttcacagcagttataccccaattaagacagaagttgttactaggacttgggtattgttgtgataggcctgaccatgcttttgtttggaagagtgtagatttgaggattttggttttataaaacaatggaatgctttaaatggggctcaatgggcaatcgtagtaggaatgtggaagaatttgttgctgagagtgatttgaactattcacacttggcccaagaagtttcaatgaagaatttcagtgtgtggcacagactgcttttgtggtattttggtgaagaatgtgggggctgtttgctattgtccaaagagactgtctgaggctgaggtggagagagagagagagagagagagagagagagagagagagagagacagagagagagagacaaagagacagagacagagagagacacagagacacagagagagacagagagaattgcattgataaaggaaatctcaaaaaagcctaacagagactttgttctctttgaactcttatgaaaagtattctaatgaaaaggagcaagctgagaaaggaataaaatgtatggttcaagtaataaagggacaccaggaagtgaattggagctgaatcctgtgttcaaggagatagattaagggagtggtgatctcaggacaagatcccacccagataagcttattgtttgtgtttgcagttgaacaaggaatagtttggacttttaatctggaatgaatgaactacaatccagtaatagcaggcacatttgtgatccagatcttgagactggaagacacgggcttttgatctggatcttgaggaacagtggccgtaaaaatattaggcccaggcatggtggttcatacctttaatcccaggttataaaactaagaaaacttctgagttcagtgccagcctgtgacagagtaagttctaggtgggaaaacaaacaaacaaacaaacaaaataaaccttaaataaattcaggcccaggtggtacacacctttaatctgagcatttaggagacagggccatggagttcaaagtcacttgacagagcaagtttcaggatggccgagcttggtagtgaatgggttggaaaacagaaagctggcgataatgtaataaagtaaaggtgccatgtttcatctcctgccagcagccgagcttggcagcttcagccatgtagctctggctttagagtctaaaatagaagggactgctaggataattgatgctggttagctggagcaaagaaattagcagtgattaagaagatactggtatcactgaggtgaaatcttctgggaagtgttttctgagagcataaagaagctgtgtttgtcagagatagccaaggttgtacctcgagctgcaactgtgcgttggtaatgtgtaagagtcacccaagcggtactagttttgaagcatgaaggggtcatgaagaacagctgagactttcgcctgtgagaggccatggaaggccattggtgaaggtttaaccccagtttcagttgaaggcctaggactgaaggggtcctacaaagaatttgaggctctgcaccatgaagagaccctatgagaggctgttgatgaagcctagtttcagtagaagaccccagaatattggagatgccagtactatgggatgatcaccaaaaacagcagccgcagtggagtggatcaacctaagcttagagtgctacagagggcagagctggagaagtgacaccagccctttggaggagcccagaagatcgtgtgtggatcttaaatattagaacaagaagttgtgaagttgaagttgccttggagaccctcatttgttcaatagagctgtgggctacccgctgaggaaaggggctaacagggagtggaatcagcccaagataaaaaggaatttgtttcagtcaacaaagttgaaaaaggagttggatatttgaagactgctttgacatcagatgtgaagatgaagagtttagagtttgcccagctggtttcctgtctcgctttggggattacagttaagtgattggatggatctcagatggagctttggactttgtacttttaacattgttacagagactatggggactttggaagttgaactaaatgtattttgcattatgctatgtttaggtatggccaccatagaacaagtctgtgggtgccagggagtggaatgtggtggtttgagtatgattggcccaagggatggcactatttgaaggtgtaccctggttgtaactgtgactttgttggagcaggtgtgtcaatgtgggatgagctttgagaccctcattctagctgcctggaagccagtcttctagctgccttcagaacaagaggtggaactctcagtgtccccagccccatgtctgcctggatgttaccgtgttccttcctcgatgctattggactgaacctctgaacctataagccagccccaattaaacgttatcctttataagagttgctttggtcatgaagtctgtccacaacagtaaaactcaaactaaaatggatattggttatgttgggatcctgcccctcccccccgacatttttcacgtgtgtgctgccactccactctccatgtatgtggcttctggagatctgagtgtgatcctcacacatgtggtccagacactgaacctactgagctgtctcccaggcctcactggcattttgatgagagttgtggatcagtctctgctaggatagatcctgtctctactctgaactctccagccaggagctgctgatttctagagtttgctacttagagttctgacacttttatcaacttgttcttacatgttctaaagacagtttccttcacttccagtaatggtcagctcacttagatcatagattacctgttatcatcctgaaaagctaaaattctgccagcacctaaggttgctttggattttgtgcctaaacttggtaacagactaggatccctatatcttctcttaggcaatggcaacagttgtaaggctgtgaatgcgtaagctcatgtgcataggaggttgccatgacagtggctgagagtagcttccagctagggagaagccagggtctgtgaaggtttctgagagtagctcccagctggggagaaacctcagcagcagagcttctggacctgagccaaatgaaatttattgtagaggtcatgaacagcacccagagttacgccatgctatgttttgattggaaagtataggtgagtatgagggtgttttgatatgtccatatgggatctagtagggatgggaaccatttagggggtcagatcagaagttgttagagcctgccaaagatgtgttcctcttattttttaaaaagacatttgtttggatggttttgaggggatttgacagtcaggggaacaggatgtcaccagtggcgatgtaaagaatggaaagcaggtctagatgatggtgagctgacagtgttcaggcagaaagtgaatcccaccactttcaggaaggacagaaagaccaagaatggctttgccttctgatgtatgatattttccaggccttgtttcctgttaatcatttctactgaatgtacatttcataacaataatgcttggtttccattgccatatagtatattaacattgaaattggaggtgtggagggcagtcagatagcaaattcactagaatcccaggctatctttctgaagaagctatcctggtgggcgacagtcactctgggctgaattcttgcacacctctctcagggcccaggctgaaggcagtgtggctctctatttgattatttcatctctgatttgaaactcttcactagtactctgttattctcagcatgccttctgtctctctgttcatattttggcaaaaaaaggagtagtaagagtcagcacctctgcttcccttacagctcttgtgatgacaccagctcacagttcgatggctttaaaacagggctgaccttcaagaccttatagcctccttcctgttattcttgttactttttaagaatccaacttcccttctaaactgtaagaacactcaaatttgaaatggtggatgctttttggttttatattttcagaacttagcacagagaataataatatgaagtactcatatgttttcatctctgattgaaatgaatatcatctgggaatattaaggaaacttttggaagctgaagcagaggctggatcatacaggaacacacacacacacacacacacacacacacacacacacacctgtgcacatgcatgcacatacatacattaagagtcatgcattcctaggcaatgggccatctgcagtttgtgcctctgctgcgagatggcgctactgaaatatttcctgttgtttaaaggaaagtgtctaatgaatggaacagaagcagttgatgagcagagcactttagaaactctgggctgttttcagtgcttgccctggaagcccagggctttggatctgctttcaagtgaggcagaagctctccttcttcctccacaagcgtgaggtcagaagttcaactcagaagcagtttttgagcaaattaggattgtgcaagtatttggaaaatttctacctttatagtattatatagagtaaatatttaatatgtgtgttcctaaatatacagataaaaactgttcagtctatgcagtgttattggtatgtatgcttcccagtctgaccacttggagctggataaccagttggtgtgcccttccctccccagggaagactactttgctgtccatcagcgttccttagttgcctgtagttcttcatggagggctgagcagcttttcctccacccaccttaacgtgttattggtggtgtccttgttcagctcttgcttagtcatgttggtgagacttcatgggtgtagcttatgacatgagatgaagatcatcatagggtaccacaagaatcaaactgctgcccagtcccagctgatacatctgtatcataactcctacattgaaggctcagggaacactacagaagggcagggtgggaagactgtgagacccagagcatcaaggattttgctgtgaggaatcactagatattttgtaaaggtgttaagagatgaaatcaacagattaaaaaccctttttatttttatttacaaaaactaagaataaatacctttttagctttcgtttctcaattgctcagtagtagactgtttgagtgaaaatagatgtttaataaaaatgccttatgtagttggagcttttgaagtagaggtcactgaaattactctcagattgtaataatgatgttgagcggaattacttcccactaaccctgaagccacgctgcagaagctaccatgggaatcagctgcctgtgcggtaaaggatgcgagctgtgtggggcttccaggaccaagaagcttcatggaatcattactacaggacgatgtttgcattggatttctcagcctttgtcccttggttgacttttcattttagaatgctagtttatcgtactgtgacgtgaacttcattaccagtaaattctcactttctaccactggcagatatgtggacaatcggcctaacgctttcgatgctctctggagcaagactgctctccatggggccgaggcctcacccactgatcctgcaggcagactccatggctcctgctctctgtggcaaagctctgtctgcagacttcagtgcattgtgcttagttatttacttacttttttcctttttgagacagtgcctggctgacctgaaactcatagagatccactgcctctgcctcccaagtgctgagattcaaggtgtgcatcaccacaccaggctggcatatgttttattttgtgtccttgctcccatatatccttggcatgccttgaatttatataggagaggacttacattagtggtgactggacagtcagacctagtgtgtgtggacagtatgagtttgtagatatgactgcagggaagggaacagccacagggctagacaacactcacacactgttgctctcctgggactcacttctttccagtgggagatgggtgtccagatctccagggagaggaacgctgatagctggttttcaacctttacaaaaagaaaaacgaactgaaactggttgttgtgggagggcatcttctgagaaggtgatcttgtgttcttgagtgagcaaaacaccaagtgagcctgttcttttggattcctctcaaatacggttttggatcagaaattgttttcaattacatgttgaattaaatgcatctttcaagatagtaatctaggttcttctacatttgttgaaatgatcaggaaataattctgagacaaagacagttgaatatagacttttttccttaaatttattttatttccaccatgtaaaaagtgatgagctacaggccaaactacatcctgaccccaaagacagagtgttgtcttcactccaggcctgtggtttctgagctgtccgtggtctcaggatgaatacccaggaccgcgtttctgcagccagcacagctgtcctgacaggttcatgcaaggagaagagtcaggctgggctaacgtttctggaggcgggagaagctggagtgctgagctctctggaagtagtgatgctgctgtagcttttaccatgaatcttttaaacagtgtgcaagagccaggcctctgaaatctgaaccctctcccctcttctaaagccggggacattatggctgatgatagtcacaacaaattagtctatttttggaaagattactctgtacagagctagaagacagttcatggtttgtctgcagtcatgttagccctttgatcaggaggattcatggtaactaggcatgcatagtaggaaatgacaatacacagtatatggctaaactgtgggtactgtcagcacactgacagaagtataggtaaaccagatgtggagcttcatgcttttggtaatgactcctcaaatcaatagaaaccagcataacaggatagcatgttacttgggaagacagacacagtcagcttcttgggcaaggggagggctgctttcatgattagttcaataagcttacattttaaggaatatactgaaaagcatgcagagtcttgtgacatgagctgccaagatgatccagggaacgcatggcttggaaggcaagcaaactcaatcatcaatttttttaattaaatattgtctttatttacatttcaaatgttacccctttcctagtttcccctccgaaaaccccctatcctttcctcctcctgctcctcaatacccactcccgcttcctggcccaggcattcccctattctggggcatagaaccttcacagaaccaagggcctttccctttgatgaccaactaggccatcctttgctacatatgcagctagaaccatgagtctctccatgggttttatttgattggtggtttagtcccagggagctctggggtactggttagttcttattgttcctcctagggggctgcaaactccttcagctccttgggtactttctctagctccttcatcggggacgctgtgctttgtccaatggatggctgtgagcatccacttctgtatttgccaggcactggcagagcctcttagacagctatatcagcctcctgtcagcaagctcttgttggcatctgccatagtgtctgagtttgatggttgtttatgggatggatccccaggtggggcagtgtctggatggtcatgccttcagtctctgctccgaacttcgtctctgtagctccttccatgggtattttattcccccttctaagaaggattgaagtatccacactttggtcttccttcttcttgagtttcatgtgttttgcaaattgtatcttgggtattctaagtttcttggctaatatccacttattagtgagtgcatatcatgtgtgttcttttgtgattgggttacctcactcaggatgatatcctccagatccatccatttgtctaagaattttatgaattcattgtttttaatagctgagtagtactccatgtgtaaatgtaccacattttctgtatttctctgttgaggggcatctgggttctttccagattcttgctataagcaaggctgctatgaacatagtggagcatatgtccttattacaatactgaatatctgagaagcacctaaaaaatgttcaacatccatcagggaaatgcaaatcaaaacaaccctgagattctacctcacccaagtcagaatggctaagatccaaaactcaggtgacagcagatgctggcgaggatgtggagaaagaggaacactcctccattgctggtgggattgcaagttggtacaaccactctggaaatcagtctggcggttcctcagaaagttggacatagttctaccaaaagatccagcaataccactcctgagcatatacccagaagatgctccaacatgtaataaggacacatgctccactttgttcaattgtcaactctttttttattatttatttttattatttatttacttttatttatatgagtaccctatagctgtcttcagacacacaccagaagagtgtgcatcagatcccattacagatggttgtgagccatcatgtgcttgctgggaattgaactcaggacccctggaagagcagtcagtgcttttaaccgctgagccatctctccagcccccaattgtcaactcttaaagtacttgtaaaactgatgactgaaagtccttttctacttttatattatctttcttagaaatagaaaatgagaaaaagcccctgtccagagaaagcctgggaatgtcaatggctggttattatcagagtatccctccagctccaaggtgaccattagctcagtgcctactgaaggagcattggggacctgagtcacgatgctcagaaactccattaaaaacctgggtgtgggagcatgcacctgtaatctcagtcctgggaaggcagagatgggaggattctgccaaccagttaagctgaatcggtgagctcagagttcagtgagaaactcaggaagcaaggtgaagggagaccaggaaggacacgagtcatcaccctctggtctctgtgcaagtgtagatcctatactcattttcctcagttaactggtgcagcctactcaagtcatcttggtattggtgtactattgattagcaacactggctctgctggcagcactggcagccaggtctgaacaaacctggtttgaatattttgtaatgtagactgctggcacttccaaacacaagggagtccctgagcacagtgcacaggaatcttaagggccaccataaagaatgacatcatcaataacatgcacaaaaaaaaaaaattgtcctctctgaggcttaatgcccccactgttaacctatgcctaactggcttctagcctccatacaatcttatctaggcctaaaatgttttcagcctctgagacttcctgctgaataagctcacccttttagctctttctgatctctggctggctggttcaactcagctgctttggctcaaactcctctccaagctgagcgattcgatctggcttctcttcagccactgaatactctgctgggcctcaaactaaccttgacaatctgttctatccgtctcattctctggcttgttctgtctttacctatgtctagcttgttctctctgcaacctgtctctaaaactttcctggacaaactgcctcccctctctctgcatctctctcttatgtagcttccctttcctctctcttctcatgagagttgggcagatcctattctattaaatctttctccaactcatcactttgtctgccacttaatcagacctcacttcccaacataggagcttccttctacaaactaattttaccttcatttgggtttgaagctgtgagctaagggtatgtctctattcccgcctgaggacttaaaggggtgtgctaaggacatgcctgtagtattccagccagagtagccatgttgctggattaaaatcccgataaacacagttgttcatagtgctaccacagaaacaagagtgccactttgtcctaaatggagaatgtatatattaggccacatttattatttagaaattggcttttaaaaattgtgtgttttctctgtgtgggtttgtgcacatgtgcccacagaggacagaaggggatgtcatcccctggacctggagttacaggccattttgtatttgatttacattccttagtttggaggtagatatgccaccgttgactgtgttaggagctgcagctccgtgtgcatctgctcttgccttgccaacagggctggagggtgcttcctgcaagggagccagagcaagaaacccagtgtgtgtatgtctgtgtgctgcagagatatctgtcggatagctttgctttcttagtaaaaatgactggctttttgttagaaaatgaatttgttactttgaggggtagattacaagaacaaaaatagtggatcctcttgtgcttttctctccctttagaatgaagtgattggcaggagctcatgggtgtggagctgggaaccttggctccctgcaagatgcctttgtagacagttgtccttctgttcttttgggataaacatgatttccatggtgtgttataagacatgttggagattttagcagtggttacaaacatggagacttctgtaattgtggtcccgttatctctaaagaagatgtaaaaaggtttaacagttcaccccgagcattttgattgatgtcagcatttgtcagggtggctcaggttgacgttgtctaaagctggaagtgttttgtccaggtgctttaagttggtgcttctggggtgcatagcagactcattcctgaaggcagggagttttgggagaatcatcagatatgtggaagtagaaaaggaaagctgctggccttgatctgggggccttgttggcaggccttcttctagctgcatgagtctcccagctcccaggggttacaaaggaagatgagagttagccttatcatagtgcattgtgggaaaatccccctcccttaaactactacctgtgacttcttttcttgtgtgcacatggcatttcagtctggtttctgcttactgaaggtgtttcctacttgttagtctacttacaactgtctccttttctctaagcaaggtcaggttttggtggtggtgcccttaatccacatgctatatgacatagtttcccagctcactgttgaagctgttccaggccagttgttctcagtgtgcactggtgacttgtgctattgcttcagcttaaaaatcattggccctcagaggtttgtctttaatgccaagagtcagctggtggctctccccacacaccagctctgcacttggcctgctgtccttacagttgttttgactgtgttctactccatgcctttttatctattgttcatccattccagcaagcattccttgttttcctgtgatgcaaacatcacttcacactgttctctcatgggaatgaacccagttgatttctgtatgcttgcacatctgcattgtttttgtttgctcttttaaattcatgtacctgcatttctggattcttttgtacatgtgggagggtgtcaaaacccgggcttctcctgcacaccatgcaggtggtgtgctactgaactacactccaagcctgtctgcatttgtttatgcagaaaggcacagtttggaccctggaaagatggcctaattgtttagagcacctcttcttacagaggacttagatttagttcccaacacccacatggtggttcacaaacagtcataactctagatgcacatgaatctgagaccctcatctgacctttagggtttaagggcacctggcacatacatggtgcatgtacatatgtgtaggaaaaatgcacatacaaacctaaaagcttttgtaaaaccacattttatttatggtagtctagtgtaaattactagaggaattattgctaggtcaaaggctggaagtatagacattaggattaattaagtttcctgaaaggctggaccagatgacggtccctgcttcctcctcttaccatgagctcactgaaagtacactttaaagccttgtctggaacttatagtatcattagctgtgaattattttgagggtgtgcgcatgcgtgcaacctgcacatatgtgttcatgtatatgcatgcatatatgtgtacatacctgcgtatgtgtgtttctttctgtgtgcatgcatgtatgtatctaggacagacattaatagcagatattctgtcatcccctactttactttgtatggcgaggtccctctccggacctggagctcatctgtttgtctggctgccagtgagctccagggatccacctgcctccacctctcagcactgacttacaaggcaccctgccatgccatgcccagtatatatatggatgctggggctccacacataagtccttatgtgtgtaaggcaggtgtgttacagatttagctgtcttcagactctgttttgtttttgagggcacctctcactgggcagccccaactgacctggaactcactttgtagaccagacttggccttaaattcatagaaatccacctgcctctgtgtcctgagtgctgagattaaaggcgtgttctccatactcccatcacattttagttgataagcattatatattggactttcattgagctctttaggaattaaatattcatcaattttatgttatggctattaatttgaagacattgttttattataaacttgtggttctcataccaaccagatgcccagcacttgtattgggatatttcttaaatgaactaaaaaatggtggctatttaagggttgctaagcgtgatcacaatgtcttcttctctttagaaggaatgatggaagacataccatgtactactgaattttatacagaaaacaaacctgcttattgaggaataacacacaaatacgttcatttattttttatttttgagatagagaaagtctcagtattcagtcctgacttgtgtgccagtcactgtgtagacctgactggcttcagactctccgagatctgcctcacagatgcctccttgcctttatgcttgaccatgctttagatggactcttttataaaaaaaacaaaacaaaaagaagcaaaaaaaaaaccaaacaaacaaacaaaaaaaaccaaccaagccaacaaacccatttcttcttgatgtcgcctatagacctagtgtttagcatgctaccaggatataaaaggaaaagttagcagtttattgctattttggaacaaacctaaaggaaaaaatatagattgaatttctttcttccctttcaggaaaaacataaacaagaattggaagacatgaggaaggctgggcacgaggcgctgagcattatagtggatgagtacaaggtaggctcaggaagttttgctcactgttcaaacccaagggagagggaaagcttgactcttggccatttggagccatgtaagcgtcccaggtcttgcatgcctctttgtgtgtctgtcagcccttatcactgccacagtggttcagcagaccctctgggaggaaggtccattgtggctcagggttttggtcttttgactccttgctttggactgaagataaagcttaatatcagatggagtatgtacagcagagatggccaccctacggtagcccaggagctgaggacatgtccccagggatctacttcctccaactgggtcctgcctccaagttgctactacttctccaaataccaaaggattagggctaccatgatcagtcatttttctgaagtcataggacaccaagattttaccatataagcctttgtgggatagttaagatccaaaccacacactttattttagtgaataatccactgagtgaaggaagtggtcattgattacagagttatgctaactattttatttgcgagactctgaaaatatttgagactatcagcaggtaaagcctaatgcataatattgtataattaattaccatatttaccttcacctatgatgtgctgtttaccttttttataggaaaaacttaagttattaaataattttttaaaaaattatttaatcccctttatttttaaaattagctgaatagatttgtatatatttaagtaatatcagattataataatgtcatattagtgatatgtagtaaagttagtatggaatttactaaaagatcagatctcctaaaactggagttatagatttttgtaaagctgagaattgaacccaggtcctctgaagaatgactagtgctcttaactactgagccatctctccagcctcacagtattccatcttcaacaaacatgttggtatcattctaaacactggtaatgagatttaagtcgtgtgcatttctgtaatattctttgcaaatggcatttttgaaggagtctggctgagagctgctcactgtatctgcttgtctgctgttgccatggtttaacattcaaagaggttttaaaagttccagtgtgttctgttgtgatttactgaaaagacttgggaattaatcaagtggccctacagagtgataattgaatttgtcatatcctagataatgagtttctattcggacaacctaatctcatccccatgaactgttcggtggcttgttccatgtgcctctcctcactgactcttcgttaaggtcctcgtgtagctcatggagttgagtccactgaggagaaacagctcagatacactggtgaccctcaggtgccaggcacactggtgaccctcaggtgccaggctgtgttatgtgccacatttatgctccttcaagggtcagactgaaatgttagagatccctgtggctcttatgacagtgtgctttatctctcagagatggtctcaccaggatcctttaatactcccttctctttcttcccactttactttaaggttaccttttagcccttctttccccattgagtctggctggtgttaccagctagtcttggggttaggcctgctggtctgtggtcaacctaaggcctgctctcatttgtggtcagcccaccaaccttccatagttaaagaaaacttgcactttgtctcccagcagccatcagatgctaactgcttctcagctaatggaattatatgtccacatctcctatgtgctgggattttctctggccagcacttaagcaggtcttgtgcatgctaacacaatctctatgagttcatgtcacttctacactgttgtgtgtgtgtgtgtaataacagtttccttggtgtcattatccccctctggctctttgcaaccccctctccacaaagattcataaggtggtttgaggggtgtggtatggattctaggttagcacagtctttgttctatgcttgttgactaggttttctggagggcagggatgtccctgtgtaagcatgctggtgctcaggtgagacgccacattttaaaatgtccaaatgatgtcaccagtagtttcaacccaatacagaaataagccttgtcatgacgtgaactattcattatgtaagatgcaaaatttctgacctactcggcatcattactggattaatgcaatgaagggaatttagttcttgtaagcctaagaatatgtgcaagccaaggccatgctttaataactgtaagatttaagacccctttatgatccccagcagctcatagggaaagaggtagaccatctcaaagccctgggacctgggcttgggtggtagctgagttggtcagcataccagttcacctgttcccatgccactggaaccagctttctgctggccatgtgaagggtggggccagctctccagcacccatgttactgctggcccataacaaggaaaacaggcagctagctcagtgcagccctcagacatctttagggctttagggcttcgtacagaccatggacatctacgtagtctttgatggtaatacgggccatggacaccaacacagactctggctgcagttggaccacataaacagacatggccctcagtgtcacttctacactgttgtgtgtgtgtgtaataacagtttccttggtgtcattctccccctctggctcatcctagaagtcaccatggccttagatggtagcatgagcctgtcacatcaggctgttccttacacttctgcctctcttcatagggcacaaaccactctactactctcccatctctctaccacatactctcttgcttctgctaagcctgccactgaggaatgttttatagtggccaaaacctactgctggtagaccagatggcccagaagcagaggtcttacaatctggcatgtgtacatttaccctgttgttgattcctgtgaccttggggtagcttctctgattatcttttagtgttttcatcagtgtgtacagagtaaagatgcatcctggtcacaggctactgtatgcatactgaagataccttaggagatggtggctcatgtgtttagctgtcagcttcctagcatagcacatggctgtcctttcattattttatgactggtgactgccctttacttctcaaaatagggtagtatagacttatttcgaacttctcagaagcactcacttgagagcaggagatgatagaccatcctagccttttatgcttctgggttgctggttgaagaccaaccttcttttattcacagaaattcagtacttaaccagggaacgatgagaaagacacaggaagatctgttatagaacagaagaaaacgaaacagaaataccaatgtactccatattcatactctcctgtaatgctactgagtatggtacatttacttttaggtcctgattttgaaagtcctttttcttagaatttagtacagtgaagtaaatgtaaatcctgaaaggcctttcctagacactggtacctgacattgctgaacacaattaatagaaaagctttttttgttaacttgcttatttgatgatatcggaatcctgttgtctgatccaatcatctccccaggatcaccagcacagatccccctggtacataagtagccataccaccattgtggtttttgttttaaggtaatctgagaaattttatggggatcagaacactgaattcgggttctcagatcttacaggacatgataaataccttgtgttgctgttgaagacacacatggcatggtaggtatcgtcccaggactctagaccagtaggtgcagctagggcctgtgtctttatttagagctctggatgctattctacttcctgaaaggacttgtgagccatagccattgtgctccattttctcatctgtcagtgtgttcggctttagctcgctgttgttctctctctctctctctctctctctctctctctctcatttttatcccattaatgactaagttgtatggatatgcattcatccactcgtgtgaacacgtgtgcacataaatgtgtgatttctcactgaaatcccatataagacagaagaagtaaactcagagaaaggaaataagtatagggaggactttcctttgttcttgagttaaggggacaaataagaaaaacttgagctttaattatagctaagcaagcaggatttgacttatgtcaaaatggtttataacaaacatcagccttgtgtttctggagtaggataagtgattacagtcagagacctccttacggggaagggaggagggtcagtatagtgggaataccaaggaaagttacacatagaaagggagatgggactatgttgtgtcttgacttctctaaagagagaacactcacttcccgttgctctttgcaaagtttctccttatgcctcagtccaactagtacagtgcccatcaacacttgaggtaaagtaattttcactactaagcccacttcaaaaacagtttttctttttgccttaaaaagctctgggggaaatttttccaagggaagtacttagttgactcagtatgttgaaatccagcttctagcttgctctaatagtaagagggagttctcaagaaacttaagagaaacatgttgcttttattttatctcacttagagctcagttcattaaaaattccagcttgacacaagtcagatctgaacatatttttttgcttaagtttttgttttgctactgtatggagaatattctttttcagtggcagctccaccctctcccactgtcttcatttttgttttgtaacttaaacctagcatagtgtttactgaaaaatcaatcattaataaaaggtctttcttttcctgttcagaattttattctgtagcagcatttataaattattttcttgtctagctcaacttgtttaattttggaattaaactgtactcttttactattgtttaaattaaagatttaggggacagtaggatctctggttttatctcactcaaacaaatttagtatttatttttttaattaaaaagtttaggcattctgcagattacacagacagagctgttaaaaccttgagcatttcctgcttcatgagttaaaatactgagtagagtttgattttgttcttcacaggtggtgcctaacaagttataactgtgaaggtgtgtcatgagttttggcacattatgggtagctatacaattttttttatcttttttttttgtgaaatgaaaattacctgcttggccacacaccaagagagaattttcatgtttccaatagtgggtaccttttctttccccagttcattgttgacatacacttggccgagttgcatatatttaagaaacttatttttttggttgggtgtgagaacactcgggaggctgaggaaggagttgctgagttccaggccaaacttaattgcctagtgaattaacagccaacttgaactacttattaaaatccagtatcagaataaatgtataaaccagctagacagccaccggaccaactgatcaaccaaacaactaactgatcaacaaaccagcctgtcaagcaactggccaaccagccagcctgccagtcaggtattcaaccagccaaccaaccaaccaaccaaccaaccaaccaaccaaccaaccaaccaaccaaccagccaagttagccaacaagccaaataagtagccgagcagccaagcaaccagccagtttacccttaccttatagtatttatacacttagagagatcttccccacaagcacatatggcttactttattctcacagtctccttctgagcataactccacataccatctctaattctctgcatattcaagaaacggaggtcccctcattaccaaatgaatgcacttgtaaacactggactgtcagtgagaaagcaatgcatgagtagattctttttcttatgatgagagcattctgatgctcccccaatccctttattattcaggtactgagccagaggcactgaagtgtaaggactggcctttgtgcttcctacaatggaaaagtggtgtgaggttgccccatacagcttttctagaataatctcaactcaatcttggtgtctcagtttcctacaataactaaatcgtgttttggtctaatgctatttttttaaagttagaatatgccttaaattcctgtttgtaaagatagcattgaattttagtaaattggtgtcagttacatgccagcctataagctcacatgtctgctgcatccagtttccagagccttcactggcctgtgctttattgcagctcttgagatgactgtgccatttagtacgggagagcatactgcatttaggaggctttttcccagggtgtacagtttcttcatattatataaagttctttcccaactagagaaacaactttgttttctcgttgttgagtattttccactgattagatgtttctgggtcttcgtccaaagatgggaaaagtacattttaagatacttttatttgaatctcaccattctgttagcccaaaggtatgaaataaatttacagctttcagttatttgattgagcgtagactctcataaattccatgttttatcatgtgatcagatttttcctggacactaaagttgtttgctgttgccagcgaagtttggcccagtagcctgctgctagatatgagtgactggataggactcagcccttggcctgttctccctcgcccctcccacccagctcgatctcactggaagactgaggaaggttgagtacttgagaatggctcctctgtgcctctgagtttacaggactgagccagaactctacatgccaggctattcttgtggtttttctagccaggccaaaaccgaaaggcactggaacattggaaggaatctagtcttattattataggtcaaggctttgcctttgttgttggtgagtggcagcctggtaatggagcaggagggagacttctagaagaagacacaaatcttcttcaccacccttcccctactccccttctcccttcccttccttcccttccctctcctcccttcattgtagcagctcttcaggaaaaacttccaatacagtaaagttgagaatgagccaggtttacttgccgtgtgttccctgagtgtgtagcacctgccttcccccacactgagcattcactgtacaaactgtagagttctgtgatcagtgctattcagggttaagcatttgatcaatgtccatcttattctaccagataggataaatggccaacttctggttattaccctgaaacttctgtgagtaactggaaaggatagtgagttcacggctaataatccctgtctccttactcatcacatggttaaggcctagcatgttctaatggagcacacaggtagaaatccgagctgacccaacagtgcccatctcagccaatactttaaaaggaacatctatcaaaacacattttctggggaccctgattagtgtcatgtgtcagccatgcagtccttgagcctccaggagtgcaggtctacggattcaactgagaaagtgcctgggacacaggaattggcctggacaaagaatggacatgtttataatacagagttattgttcacttgtcaatagtgttccatttggtgtggaacagatggcactggtatcactagcagagaagacactgatgagagtttaccatttttacctcaactgaatgaactccacctgcagatgagggtatagttacagacatctctgtaagggcaccatctacaagaatgcatttttctttgaaatttcttgcctgtttgacagatgtaagagagaaatggttcaatttgttctttattgtgtaacagaccctgaggacagacagcagagacataatgatctgtaaaaccctttaactgtctgtcttggttcttggtggtgtgtaacccacttttgatatcagagaggccaagttggattttaatccttacattaaggcccgctttctgtgtatacactgtgtacgaacatagaattttctatacagttatatgttattaaaggtttgccttactaaaactacttggccttttttttggggggcggtgcatgttagcaaacatgatgaataattggaaactatttgactatcttttgaggtagaaacttcaaatcttcttgtctcttatttatgaagagttgtaaagttctctgtctcagtgagaagggatttcagtgaaagagtaacccatgactccatcctactttcagtagcagaacacaaggtttcatgtttttaagggatatccatgtggcccaccccaatttagaaagtggttggtaaagatcagtttgggtggatggcaagtctgccaggctcagtcactctattcaatggtgaaatccttctgtgctggttactaacagcccacgttgcccactcctaactcctggggagcttgagttctgagcccagttgatcctgacttcagagagtccacatcaacaggttttcaaggatttcaggtcttgcccttactgcagtgactttggtcatctgctgtcgcctcataattctgctcctcacatcaaggcaggtgtgtgtctttggtgctgctctgatgagctgatttgaggacagcctttcagcactcagtgctggtaaaggttcaaattgaagaaccttttctactttccagagagacctgtacttcatgagttgatcccaagttggaaaaagtaatgatttttacaactactaaaagtaatgctggcaccacttggttcagagagtctatttcaggtatatacagtgaggaacctaaaccatgaatcttatcaggaagatgttagagcaatcccattgtgtaatttcattaataagaaggcaaaactgccaccattataagagagaacatcatcaccaaggggagagtctgccgttcttcccagttaccctggcaacataggcaaacagaagcataagggatatatctatatataatatatattatacacacacacacacacacacacacacacacacacacacacacacacacacacagaccctttctgtcctgatctagggcttgcttgtgcttgggaagtttagatctgtccattctagtcctgcagatgatccccccaatgccaccaaacttcctgctctagtgaccatgtatctcatttaatcctctgaggacttaggaggaggaggcagtttcagacagaagtagctcttgctatcctttctttgttctttcaactgaaaccatagttgtgattcaagtcacaaggaacaagattgtggcatcagaaggaggccagcccacatggcagcttttccaaaggttgaggtatctggaaggcagacatgcatagcctctgcactgtgcttaattttagaaacttcttaattttaatatgttgtccatggcacaaaagaaattttcactgggagacttctgtggtgtttgaggtaacagctcttatgttactagagtcctgtaacgacaaggccagcaggaaccattccctctgtcctgatggttttctttggccttcgcagcctccaaagcactttataacatggctagactgtattgaatttccgctaagatccacgcccatcagctaccatttctctctttggattgtgtattaatgccgcactggtcctcagtctacagaaaagcctgtacaggcaggctttgacacacacactacatgccagtacttctcccacacacccagcatggtaacagacatccccagcatcctctctgtaaccttgctggcgctgtcttttaaaacagaaaaagaaaaaaaaaaaatggaaaaaccagagaaactttgatgtctcaattgagttgctaagaaacttagacaatagggttttttcctttttttttttttaatgacagaatcaaatctgtgttagttctcctcagatatgcagtggtcatttctgagatggggctcttatcttctattcagaggttgagcgtatggggtctggatagcctctgcctgactcaggaggagccaggatgaagtaactggccaccttacatccagactgaagcctttgttccacgcagctatctgtaaagatgattgcagaagacaagttacaaaatgttaatattaatatgccttttttgacataaagtccaagagtatttcacataggaagacaactattgttttttgtttgtttgttttgttggttgggttttttttttttttttttttgatttttttgagacagggtttctctgtgtagccctggctgtcctagaactcactctgtagaccaggctggcctcgaactcagaaatccgcctgcctctgtctcccgagtgctgggattaaaggcgtgcgccaccaccaactgttgttttatatagtaacacaggaagccaggaacacaaatggctactgtgagtgtgtcttcttgtgtccacaatggataaaacccagatgggagaagggctttggggactttcctggttagctggacagaggcactaagagccccactgctcagtaacctgagacagtcaggaagggatcactgtggctcttgcttacactgtcctaactccactttccgaatttgcctctgttctgacttccccatgccagctgctgtgctgagccttaggggcaggcccgacacccacactacatatcaggatgattgtctctctgcgctctgaggcagaaagtgtcctgtggataggagtgtatgtggctgggaggctggcctgtctcctgtggctttccttcctgttcccaagcagctccttctcaaaagccacgttcaaagaagagggatagcatgactcagtaggagaaggcagacagcagttcagatagtggctccactatgggaagagactgttccatttattaattgtcttcctgaaaacatagctgaccagaaattagaattagccatttgaatttagggtagttttggaccacgacaagtagggaattgagaacagctctttccactgaacagttttgtcaagttgcagaagagaatggcagctttgccaggtgtggggatacacacttgacctcccaggacttgggaggtgggggcaggagaagaaactaatatagtgagtttgagggcaaccttggctatctgacaccccttctcaaaacaagaagatactccttataaaagacctgccatttcaagaaaagtatctatatcatcctttaattaatttttttatgccaaacatggtgacacatctttaatcccagaacttgaaaggcaaaggcaggcagatttctgtgagttcacctccagcctggtctacatagtcaggtccaggccaagcaaggctatatgtatagtgagaccttgtctcaaacaaaacagaacagaacaaaacactgaaaataatttttataaaaaaatttagtaaataataattttgtgagaggaaaattagagatttacagcatttagtcccagctcagaggcttaattttggcttctctgtccaccatttcttctactgctttaggttgtcaacctggactgaagcagcttcaggaaacagttgccctgagggagcactgtgtctctttccctgcttgggcctgaaatggagctacgacagcagcctcacagctcccattgcttttttttttttttctgaacatctgagacttatccagaggtttaaaaagtatttttagtttgttaaaaaaaaaaataaatgcatgcctatttatttaggattttgatgcatgttgtttccaactgaataagtctattttcaaaacaaagattaagagatttggctcacttttttactggtgaatatgccaaaggtctgtttcccataagatgtgtctgccttcagttgctgttctgactgtgaatagtttattatagcataggtctaacaacagagtatgtgctaaagagccctgatgcacgtttaggatgttagagtctataaatagcatataaggcactatggaaacatgttacactcacacagtgcttagaagggaaaagaagagttggcatgtaaacatgtccaggaaggggctgttggccccaccacttgccagcttgattttcttatgtccttccctggcctcccgtgtccaccacattatacagttctgtctcacaagccctgctcgccctctgagtactgctgtatggcgggctcacacatacccagcctccaccctttcatgttgggggcatgagcatcctggggggcaggcttcagtgaaatcactcagagcctccatctgcttccacttgccttgtggtctcgaagatcatgcttggcccatgggtactgcagtgtgcccagaggatgtggagttttgtcagccagtgaaatatgtctggcttttcttcctccccttaccaaccctccccccacccccaactttcatttgctcctcatcctgtgtggtctactgaactgaattgctatttaacaaaactatttactctctttatcattgtctacggcttgacttttttaaggagaaggtgtgtagaatccgagccaaaaaagtgtagtattagcagcaataaaacctaaagatagatgcttaatgtcccgtgtcagtgcaccctgctgtcgtgtgtgtgtgtgtgggttcgggagtgcagattgccctactgagatgcagagctgtcaaagactctcatgccagcagtcagctccaggttgtctgatccaagcttttttttttttttttttccctaggcacttctgcagtcttcagttaagcagcagctagatgccatcgagaagcaatatgtgtctgcaatcgagaagcaagctcaccggtgtgaggagctcctgcatgctcaggtactgactgtgtgccctccacacaccagcgctccccctgcctccctcctccagacttcaggctcttctctatcagctgccagccgtccatgctccttgatgtatcttggaaaacaagtacccttgaataaatgtagttagagaactttatgatagactaggacaaacagggccaaaaggcctacactacgtgggtttccccttaatccatgatcactctcatttccatttctgggttatattaaggtagacaaagtcacagaagcagagagatagctggtgttcagaatgtaagattaatttttcacagatgcttacaaaacaaaatataagctaacagggaaaatacgtattaattttggagtttttaataattttcttaagtaatagtttctttgtgaaatttttaatgtttttaaaagttaaaacactgagctactttatagaaattaagctgctaatcgaagaacttttatgggtataccatagtcagtaatatttgtaagatacttctttgtgatgctttatgacataaaacttggaaaatggaagcagctttttaataggttaggaagaaaattaactacagttgaggaatcaaagttaagtataaaatttggtggaggtttatggataggctagagtcaagtagggatctgttctgttaaagattctctctctctctctctctctctctctctctgtgtgtgtgtgtgtgtgtgtgtgtgtgtgtgtgtgtgtgtgtgtgtgtttgtgtttgagcaggggaggagagagagagagagagaatgtaatgtctgtctccatctttttgtgagacaggaccttttactgaacctggctgacctgactggccagcaagcctccaagagcctcctgcttctgtcctccactgccacaaatttgtaactacctgtaatttcagctccagggaatcataacaaactctggcttctgcaagcacctgtgtgtacgagtgtgcacatacacacacaatagaaggagaagaaaagtgaaagaaaccctgtgcataggattgtcttgggtagcagctagtctctggcctctcactgctttattacagtcagctctgcttgctaaaggcaaagccgcatggtgttggttgtgtttctgtatagcatagtcagaactctcaagttgagagaattatgaatgttagggtaaggctgtgcgaacagaaacattctcccagccataggttggagcacaccgggagttgtctgacaaggaggtaggttgcatcatgagatacctaccagtggtcacctgtgttcatatttgtctcaatctctttggtaaacagctttcatataattcagtctcaaaacgttctcttacgtttgctttcaaatgatttccattttggaggtatataagtatttgatgtaaattaatttaaacttatttatgtatatgttatctgaaatagatcaatctccttttttataaattttttaattacttactttgcatcctgttcactgcccccttttccagttacccactcccccagcccttcccccatccatcctcccatctcctttttctctgaatgggtgggggtcctccagggtattcctcatccctcaaatttcaagtctctacaagacttcatgcttcctttcccactgaggcctgacaaggcagcctagctagttttgtaggtgggctggtgtccatatcactccaccaatataccccacatacaggcaacagcttttagaatagcccctattactattgttcaggaaccacaggaagaccaagctacacatctgctatacatgtgcagggaggcctaggtccagcctgtgtatgttttttggattgtggttcagactctgagagccccaagggttcaggttagttgatgctgttggtcttcctgtggagttcctatccccttaggggctgcaatccttcctcctattcttccataagagtccccaatctccatccaccgtttggctgtggatgtttgcatctgtctgatccacggctgctggagcctctcagaggacatgctagactcctgtctgcaagcataacagggtatcattaatagtgtcaggaattgatgcttatccgtggaatgggtctcaagttgggctggctattgtttggcctttccctcagtcactgtttcatatttgtctctgcatttcttgtagagagaattaagttttgggaagaaagttttgtaggtgggctggtgtccatatcactccaccaaggttcctgcctggccacaggaggcagcctctccaggcgcatattcccagtgctgtgagtcacagctaaggccacccccattgattcttggtggttcccccgcatcccaggtctcactgattcttgggtgccttccctatcccaggtctccatctcttcctggagatatccttcctccccaccccccatctgttgcagatttctcttcattttagtggccatctgaccctccccctgccccccacacccctcccaattgcttctcccacccagttttcctccatccatctgccttcctcaaccattccacattccatttccccgcccaagtgagactcaagcatccttgcttatgttctccttcctgtccagattccttgggtctatggagtatagcacatgcatcttatattttatggctaatatacacttataagtaaatatataccatgcatgtccttttgagacggagttacctcactcaggatgatattctcaagattcatccatttgcctacagaattcatgatgtctttgttttttatagctgaacagtattacatttgtaaatgaaccactttttctttatccattcttcagttgaggggcatctgggttgtttccagtttctggctattacaaattaagctgctatgaacatagttgagcaagtatctttgtgggatgttggagtatcttttagatatatgcccaggagtggtatagcttggtcttgaggtagaactattcccagttttctgagaaactgccaaattgatttccaaaatggctgtgcaagtttgtactcctgcccgcaatggaagagtgtacccccttgctccacatcctcaccagcatgtgctatcacttgagttttttgatcttagccaactgacaggcataagatggaatctcagagttgttttgatttgtatttttctgatgactaagggctttgatcatttctttaagtgtttctcagctattaggattcctctgttgagaattctttgtttatctctgtaccccattttttaattaggttatttggtttgttggtgtctaacttcttgagttctgtatatattttggatattagcctctgtcaaatgtagggttggtgaagatcttttttcattctgtaggctgtctttttgtcttcttgatagtgtcatttgccctacagaagcttttcagttttgtgaagtcccctttatcatttgttgatcttagagcctgagccattggtgttctgttcaggaaagtgtctcctgtaccaatatgttcaagggcatttcccactttctcttctgtgagatttaattgggtattgcggcctctttctcttgggtgtgtttgtttctctgaccatgggctgtttcccctggctctctgctggctccaccctgtcattgtcctctttgaggtagcctgcttgtcttggttggtggactcagccatgcactgtcctgcccccggcctggcaaagctcatttcttgtgtctctcctttattcacttctagtgggcagcagtgcaggtactaggttttcagcaggtaagtactcgagaaagcagatactgataaacaagaccaaaggaatttaagtcagaaagcaaggaaaacacagacatgtattgtgacaacttattttcctgaaataaattcattttatgaaataaaagttgagggggcttgtgcttccccacagctgtaacttcagtggatcagactggcatgaaagcagataaaaggatatttttattgctctgtttctcagacaaaatgtatttcgaaacttgtgacaggtgggattggtatcatagacaaatactgtgctgttagaaaatagcttttaatgtaactgcatcagcgaggaaattaataaaggctgaaaaaggatgggaaataggttccacagaagttgaacagtgacttagcagtggtctttcccaaagcacaggaggctactgcagtcagagctttcctccaacttcagagtccagaagtccttgtaagcaggatgtgcaatgcagtgtcagaaaattcagtgggagaggggtgtgagattaaaggaagggtgcacatatgtagataaagacatacttgaaaagataaaagggcagacactctgaaagctagcatgatgtcataccctctctaaatcctaagctcaatcatttgaaagcttttaagtattttcctgacacagaagtactccacacactgcagcgtagccttgtgtgagttgtcagtccttttacacagccacccctgctgactccctctccttgcctcttctgtcctccaggcctgttagtgtgtgattctttggtgaaccctgcccttagtgatgtgtacccctatggctctcttcctctgcataccgttgctccactgcacctggctcttctctctgcacatctgggttcttatctgatgtaccttagatagccattagcagagtccacctaggtgttgggagcctttattcattcaaggctctcaccctagcattgtccaatgtccagtgtcccagtgtctgcagtctgtctgtttaagcagaggaatgaattccagtgccaaatactagaattacagagggtggaagtctggctcccagactccataaaatcttcaggttttacctaactcagtaactaagttacaactcagtaactaagtaactgtttattacttttgcatactgatacttacatgggcaaaatgagatgaaactactggcatcagaattcaggctgtatgaaaattgtttaatagcaagtataattagctattaattattagaattaaattataaattggtttataaagtagcagcagtgttatctaaattgtaatggtgtttttgttcatttttacctatcaagaacacttgagtctcattgttattaaataggcagataaagtgtgctctgagaccatttatctgccaggaaaaacacattaactgctaattattgtcccaaatgtgtacctagggatatgtgaacagatcatggctaaccaggagattgttttcttctaccacatacctctctttgctttattctctgcttacagtaaacttaagaaatttaataaatcgttattttaaaacaaagcctactccactaataagacacgtgttcctatttcttttgaatgcattctttgggagaaatgagtcaccatcctcctaaaaccaaataagccataaagataagtcaggttcatattaagatgaaagccaggacagacagacagatatataatctccatgaacattttgcttggcctttctggagtctctcagtgcatagtctattcaaataaagacagcttccttggcagtggctgctgtcctgttggagcagcagcagcagtgttgtacgggggggttgtcagggagctagggtaggaaactgggaagcatggcttttagtcctaagaaagatgaccaagtgccgtggctacacaaggagaatgtcccaaagggatgttgtccatgctggtgtttgtaatcatgttgatagatgctgtatgatgctattcctggggaaatgtcaacagataatctactcaccacggataataaacctgtgttgaccacatcacagcactgatacaacccaaatccagtgacaggccatagcaccaataccacccaagccacttggtgaaccaatgagttgggttatttacaggaatatgggtgagggattactttcaaagacagctggatcacccaaagcccaccccagcagtggtgagagtttacagacagctgaaatcctggaccacacttcacaactttgaggcagttctacagtctgaagtctgtgcctgacagacagctcaggtgatctgagcatctccaagtagttgagctcctctgaccctccctcttggccagttttacagtttgtatagagaagggttcaccaggtcagtttcagagacttcctgaaatgttttagttgaggacttgctgagcttaagaatttttatggagaatgtaatgtttcacctccctttagaacattcctccatctaaagagctttcctccaagacgtaaggttttacaagatggaaattttatcccagaggcaattgctgtacaatactagagtaacctcatggtaagctattaaagaaggttcatgactctaagcacagtgttttgctaagggagtgtatctgggctaatgtgaacctttggagggacaaagttgttaggcttgtcagactagaaaatatgttagtgcagactgcactgaagtcagggttcacacaaaaccctgtggacggaaacataatgtgtgggaaggagaattaaacaactgactacaaacagctgaatgaatcacatatggaagggaatcagctggggtggcagctggggggggaatgtgtccgtatgtcttcattctgctcagtgcccaagagtggcttgggtagagaaggtgtatttccacatagtatatagcacattgaaagtgtttaagacaccagcatagcagcactgtgtctaaagtggatacaagggtcttacacgaaatccttcaacatcgataccagattagaaggaatcaaactcagctgtctcatgtgcatgtaacagttagactttaaacatcaggccttaagagttaaaaatactgttccattaatttagttcctaaaaaataatagaggtggaacagtccttggtactgaaacgggctgcctgtacagaaggccatgtgttagcttatcctagaattagggttaaacatgcagaactaggagccatttccactcaacatgcaaatacaaagtctcaggtgagcctcaaatcacactggcatgcagttgcacacacaaatccattttcatattaaaacgacaatcttgcattcccccagcctaccatagatacctcggtctcaaacatagtgagtgatgacatcaagtattctcaggtttgcttccatggctctcgagacaactttggatgttcatgccacgttgtaccttccctagaagggacccaggctccccagcttttacctcagcatcattgctcctgagttagaacattgtcctttttcagggcgaggtaacacttctgtgtagactgaaagacagataaaggacacagtatgtgatggtggccattcatttccccttgttctaggagtatttttgatgatcttgctgtctttaccttaacaatttgggaatcccggtatctcttcagaaaaaaaaaaaaaaatgtatttgtcagagtgttcctgtggaataagtcaaagcttaacagtaatttactatgctatgcttatttgctttcagtagaaaaatatcagaaacttacagaaagacagggaaataaacaactttgggctattcaacaggagggggcttctacccacagattctccatttctttggctggaggtcctgggtgatggctggctggctattttaatgaagattctggagaaagttctatgataacagattctgtgccaaacaaagaattagagttatttcttatttttggtaccgtgtagcccagaattgagttaatatgaggcctacttttaatacttagaccctcaatatgcagaaagaattgttatagcactgcatgcaggcttctctggaccagcattccagtgctcaccatttgaaccccttttacagctgtttgaggaaaagttgattaggtatggtgattttacttgtatatgtgtgagtctacatacaccttaactatagcagaaattatagcatttgtgtatcaacaaatgatcaaaaaattaataagtgaagttcaaattataaaattatctaaatcacatgtgtcctgtcccccaaaacccatatgcagcaatgttacacagcatatgtgtttgtatctgtgtgtctgtgtgtgtactcgaagcattttactgcattaactcatttaatactaatacttaaatgttattggttgaaaatttcaaattactataatttgattgctgaattattaacagtgttgcaccataagtctggtatatgcctatgtgaggagagggctgtgtgttactgagtctgttgctcaattactctcatatcctttctgttattagggaaactgcaaaatctgccatctgttttttctactttaggaaataaattattttgatttaaattccccttttctagctgatgcatgtttctcgcatatagaagagagacaatgggttttgttaatgttctttgttctataaaagacagggccccacactaccctcacatgagcctcatactagcctcacacgaggctcattctagcctctgctctgcacatatccagcagtatttttagtctctttactctttttctacctgggcatacgatcttttagggaactagggcattaatgatattcaatagcactaagttatttacctcagttaaagataataaagacatgaggatgcgtccatccttcccaagatggtctcaacccagtctgcacgttctgttcatttagagtttaggtgtgagaacagctcaagggaaactggcaagctaagagagtgtggaatgagattgttaaaagtaaaaggcaaactcatgccaggagtccttacagccccaggaaatgatggcgtagtagaggctctctctactacaacaaacaaaagatctcatcaccaccagatctgacttaagggagtgctcaagggagtcattcattacttcaaaggcctttctccaaatcctagatgtcatgaagagcagagatggaaaccctctatccccagaaccacatgacaaacagtactagttgattaagaggaagctagagattatatatattaaaagctgggagatacatatatatacacacacacatacatatatacatgtacacacacacatatatatacatatatatgtacatatatataataaaatcctctgatattgaaaataaacaacaacagctatgtcttcatgatctcaggactgtcagctcagccttgaggagtggggcagggaggcctttgtttaaatctttttattgatcatctatcttctgctttcttatgtatgtctggcctggttttccactgaaccagcaatttcgtacgttactggtctgtgtaaatcttacccacagctatttcccaacatgatctggggtgtaatgagtggttaatggcaatgtccaccagggaatcttgcagaccagatgatttagggagactcagtataatgtccttgaagctttggtctggttacatgtaggtccttatttaattagtttacagccactttctgtgcagggtttagatggatgccagccttattttcctctcaacatgattcatgaaaaactggctgcttgtttttatcagtcaagacttgacgtaattctcgattttctttgagttattggcagttgtgatgatatgctgggcttacaaacttgtctgtatgatgtgtggctaactgactctcagagctttcaatatgtgtatcctgtactttaaatataggacattgtgtctctaagaagctagtatgccatagaatcggatataaagtggattatatatagtaatgatactatgctgactctgaaagcaaacaccagtgggccacagagagttcttcctgtgggaagacttgacagacaggaggtatgttaatgggacctaaagtcctgggttttgactgacagaaaaagcaagccccttggggctgctgcagtgttcgtcacaccaagctcatcactgtggcgcattgttctgtgagtattgacagaaccgcacagtcttgcagtagccgcttaaatgaaaatatagtcacaccaaaacaccctttatgccctttttataggtcatctgcacatatgtttggagagagatcaagaaacaccttcccctgagattgggaggccactttctactatgaatcatgtcattctacgtggtgccttttattttaaacactttctagcttttaaattttgaattagttattaagtatcttaaagaattggaggacagcagtagaatgttttccacgtcagatgctttagagccttgctgtgcacacgccggttgctatactttacttcaggatgaattccttgtgagcagtggctgtttgagcttctctttccacttgacggacaggactgtttttagggtctcgaagctgtggagttcccatctgcctggtgttcccagtcactcatatacacccacaacgtgtacatagtctgttttcctagtagcactacattacaaagctcacagccctcccaatgtcccccaaagtgtatagttcctccagtgttttactcttgcaagtacacattctgggcacttggaagttttcattattaggaacgtcgggtgaatgttcatgtctttcaaaattcatattgccacataattccgagggcaggtctgggagcaggacctggagggtggactcagcacctcagcgggaggcagtgagaacccagccttgaaggtgtcactgcgagaccaggaaactgctctctcttcattactacatatgtgtgataggaagtccctgctatacatcacttccatgtcccgtggtattgtcacacccatggaaacgggatgctgctaagatatgagatagttgtggttgggcttggtacatctgaggatcatttctctcaagctgctgctcactgctgtgagagtctactgtgctatgtttacacagaatagggctgagatgagttttcaagagctgtttcatttagaggtatagagactgaaagactctgcttaagttttggagtgtgtcaaaacctctgattatgtaaaccatctatcttaagatggaagcctactgtggaagtcccgtcagtctctgcgctactggtctcccaatgttttatttcttcacttggtaaatcaaagccctgtttaaattggagccactgtttactgatgttccccatgcttattaggaatatgactattggttgtgtagatctgctgctttagctaatgttacagtttgatttcattctcagtaagaaacatgttgatctttctggctttgtgaaatctcagtttatcttctctaaggtttctttcccagtaacatttaccgcactgtcccataaatgactatctgtgattcattttatagcttatcaagttaccatgcatttccattcatatcaaacagaagtgatcatgctcttctagatccttctagagtccttcgagttcaattggtgtgtacagagtaagagacttggaaaaagtcagacagttgtacagaatacgcaccagcaaataccacaaatacagaagaataatggtagatttcaggtacaaagtatgtagataagtatgcctggccacaggccaccaaggtggcttaatctgagctgcagtacagaggaggcaccagtgtgtgatcgggaggatctgccccaggcatgacttgtaatgtttacatatcccgaggaagaagagggtgttgtgttaggttgtgttatgttaggttggggtttgtttttgtttttgttttgtcttgtttcacattcaggaatagaaaccacagaacctctgtatttgcatctgagtctggggtctgagtgctttcttttgggatgaactctagacctggatgctttgtgttttggctgtttcaaaagattgtttttgacacccttgcacacagcttctactccataaagctagaacttatttctccaattgcataattttataacttttatttttatatcttcatgtaaaatatatataaatttttattatacttttttattaaacttgcactgcattttaagaagtgatatattatctcatgtaagcaaactgtaacagacccctcttggatgagactggctgggatagtttcaattaatttttgtaatgtcttttatggggctgtaaagcagagccaccacacatcagctgttccccagggagacgcaaggctgcaccactggctctggcctgtggcctttgcagccccctgcttgcactgcactgcaaagccctgcgagcgactggatttaactttggaacattaccctgaggcagcttatggatacttgtaaaagaaataaagatgtgtttttaaggcagtttgtgactgctttatccatggtaggatgggtgaacccactgaatatttatacaaaaaaaaaatctacttagtcaaataaaaagaatcaattactgatacatgtggttgattgtctgactttatataatcatggtgaattaaatacttttctgccattcctcctcatcttcccatgaattagagagggtgaatggaatgggaggtcattctgtcttattttaagagtgttgtgaaaagcacaggaataaacagatgaaatccattctgttatagatgattgtggtgaggaaggccttttttggagtattaatgtagcttttcgttgctataggtaattactagttagacctgatagttacaaacacagttattagatagtttccctttctggtaatgactttataaaactgctgtagaattcattaatacctgaaaagggaccaccctttcttaggctcaggttacacattggatgggaggcgattatggggcagcacagccctcagctgtggggttcattgttgccccagctcatgtaaagcatacgtgtgcatgacccaaggaggctcgtgattaatgtcaccttggatattgtgagtaaactctcctttaatgtcagtgtcagtgagctctgtccagacaaggccaggctgtgtgctctgtatggatgctgtggtaagaagcatcgttctggggcattttctcagtgtcgcattgcatcttagtgcacacatcttgctggtgttcttgtcggcctctgaggaagctgggctcccttgtcacccactgatttcctctcagcaggtttgcaaagttaattgtgaatgattgatccttgttttaaaagaaatgttgtttattgaattatgtttattagacctgtgtaagcctaaactgattaattttcatctcaagagaattatacttatcttttcttcctgttcatgtttatgatgtatatgtatatgtttatatgtgtgttggcatgggtatatgaatgtatatatgcgtgcgtgcgtgcatgtagaggctagagataggtatcaggtgtctttctcttttactctccacctcatatatgaaggtgagacctctcatttgaacccagaaggttcctgctaagctagtctagcctgcttgcctcggggattctcctgtccctgactcctgactgggatcgcaggcttgttctcacactctccagtgctcacagcagcacaggcactccaaactcaaactctcacacttgcatggcaagcatcctaggaatacactgtcttcctagcttcgtatttactagtttttagtctgcttgccctgggtgggacctttgcatatattctctaatgtggcttcgtcatgctgggcatggagccgaggaccttgtacatggcccaggacctatacccccagccttttttctttttttctttctttctttcttttttttttttttttgaacttggcattttcctgctcagacccgaggcctggattcctgtgtgtagttaaaatggatgttgtctgtgactgtgcatgtctgtgaggtgaaagctaaggcttctgtgtgggcactgcttatacaatctacgcacttggcagttacccgaccttgacagattcacatgggaccagaaacttttcaggattgaatcatcatctgtattgtagttagactgatcttgcctttcaggaaaaatacaatacatttgtattgcttttcaaaaatgagatgggaagtaacattgtaactagtgaataacagatgaccttacccaggaccctggtcaatctgttgaggctctaaacgtagaacatgattagaaacctctgttcagataactcacttgtcagtgatgggtgggatgcagccccgtgtgtctggaatgagtttgagctctgcacacatgatgtttctttgatttcacaggttccattttagaaactgatgaaaacttagagtgagaaaactgttcatctctgtcttccacagagcttagtatacacacagaacatgtgtctgtcccacaggtggccctcaatctatctgggctctgagtgcttctgcagctgcatgatgataccctccattttaggagccctctctccaagcggggctctgtgcacacatttcctgctacagggtgtgaggttgtcgtgtgtaagccagagcttgagctgcatgcctggctgaacctgagaatccagcagggtcccaagcatgacttgagacatgtcagctctggtttcttgtaccctcattttgccaaaatgtccatgtttccttcagttctctctgttgcctggaacagatgttccctgttttgctcactggtagattttcagagccacagtcatagctcagatgtctttccttgtagcatcagaggcttctagacgtgctggacactgagaaggaactgctaagagagaaaatccaggaagctttgactcagcagtcacaggagcagaaggtaaggcttttgtacctgccagggctggggagggagcacttctgctgccttccctgcctgcatcctccctgctgtcttctcatttgcaggaatcactggaaaagtgcctccaggaggaaatgcagaggaacaaagagacactggagtctgctgtgaaggtaggtatgtctgtccaggctgtgaggatatgcccgaccataatgctggttggtgttctttctcagtggaattacatcccatctcattaacagtgtcactaaacaatactttgttccagaattccattttttcttcactttttttgacctacaacatgaccattcatactcctgttaactcatattctatttcatgttggcattggaaggctttgctacatagatttttagttccttctttaaagccagttatgttagaacactgatagccacctccagtgcatggtggatgtcaccagagagacgggaagacagaaataaacagttaacgcttgttacttgaaagtaggttcagtaaccatcacatggtttttgaatagcatatggaatctcactttgttgacggtggtgatccaggaactattacaatttttgtcttttccttatgaacctacagttgactaaaaatacgataccaacaaggcagtgagtaaattatcctgaccttgtaagttgtatatctgcattaaaatgcttatcagtaataactcaccttagaattgagccttgagaaacggctagtcttcagaactgagttagaatcgaatctgaatgtctagttgaggaagatatgagggcctgtggcttaagtgtgtccttttaggaaataggccttagctgcatggagcaggaggctgacccatgaaagcactggtaagggcatgcgagtgtgaagtgagggacaaatgaattgccaaaaaggagctggaaaccaagtcacgagtgtagacagcattctaaggtgaattgaacacatctgttaggatgcatgccaaactctgagtgaggagagtggacccaggaagaggagaaggtaaagctgtttccttgagtggagatgggggtagactgaacgaagggaacagtggtgaaagttcctgtttgctttccaggacttagggaggttggtgatgggatggttactgtgcgtgagtttgttacagactcctcaggaagggcagcctgatagtcagtactttccagataccaacggtttagaaattatacatcagttactggaatctttgaaaattcaggaaaaaaaaatgtgatgtaacagacccgaaagacatgtttcagtttgcatgtattttccttaccacaactaatttaagacctacattttgatgcctgttgctttacactaaggcttgattttttttaagtgcagaaatgtcagggggcaaggatgaaaagctgtttaaaaatgatcgaatgtactgtgcctttatttagtaagcataaaaactgtgatgttgggactaaccatgtgggttagttttcgtggctggagtttgaccttattgttgatgcttctgcttccgtcattttgtgttgaagcttgagaaagaagcaatgaaagatgtcatcactaaagcagtggaagaagaaagggaaaatctggagaaagttcatgccgaagaaagggaactgtggaagacagaacatgcaagagatcaggagagggtggcagaggccatccaggccgctgtgcaggagcagcagaggatgagtcaggtgagcaaatcacccagaaacccggggccttgtggacccgcccctcacagggtaaggcacgtgcttccatgtctgacgtgaggtcactgtagtacatgggtcagttcacatcacagtgtttctattctgacctattctcttacatacctcaataattttcctaataatttcccctttctcctattaagaatcctatgatatattttgcctttttcctctgtgttggcaggatcagatccatgtttccatttaacattctgtgttaaacttcctccattcatttcttcattctctttctcccctcctaccttatatgaatatgcatgtgcatgcatgcagaaatgggtgcacactcacacagtaaataatgtatttggttagaaacagtgagattcaaattaattatgtctgacttacacacctatgcaccttgggttggcagcagtggctaacacaacctcacaagtatccccatggtcccatgagaggaaagcctcggtgagccagctggtcctacagactagcttctgcccactggtcttcccaagcttcatgttcacagttgagcttgtgtgctgtgttttacagtaacctgggcttcctgttggcagaagtacttgaatgactgactgtatgttatacaagtataaaaaggcaaagataaccttcacggaagcccgttttctgtgctggttgccaggcatccataaggtgtagcacaacataccttacactttaaagtgtgtcttctccaaagctgggcatggtcctccctgcctgtattcctagctctcgggaatagaagcaagatcagcacttgaagactggcctcagtaatagagcaaatttgagtccagcctgggctaaaaaggaccttgtctcaaacaaagcaaagcacacacagcagaaaatgtgtcccctgtaagttgagaatgaattgaagattcctagaaacgtagggttttggtagagcctatctgagcggaaactgctgtggttgcagcaggcagggagcactgggcagggagtgggcatgagggagcagtgtgaatgagctggcctatcagatactctcagagtctttgtaatcagctcttattttcacatgttgactccagcataatcatcaattgctacttcacttcttaaagactacgctcctgctcagggaagcttaaaatggcttttgtggaaagctctgtgaagctcacaccttgcctggttatttaggataatcatgaagtagccacaatcaaacttacactccaattgttgtagcaatgatgtgactgcctgtttctccctcgtgcctcttttatttctttagacacaggagtagaaaaatagtaacccagccttttcaacagagatggtgaggaagctaactaagactcatgtcaagtgttggtcatgtcagctgccatgtttagtggtcatgtcaagtggtcagtggtcacttggtgaggtgtgaggagcttgcatgaacaggggagtgtttcagaggagaatgaagcagagacatgcttggtttagttggaacagcgctattatttgagaatgaacaggttggaacagtagagcaggcacagtccagaactacccagcccctcctgggttcaatccgtattttcatcacgtgacagagtatgtagagccaggcgtcccagtgcacaaccagacttcagtctgtattcccgggaaggggccaaggaagtctgggaatttattaaaattacacaaaaatgcacatttgtgcagatttttctgcaaagacaatttatacttttattaaattcttaaaagaattttaattaggaacttttaaaaaaatattacaattggcttcctattgccttctgaactttctatgtaaaatctattccaaattgattaaatacttgaattataaattatatgtatctaaaaaggaattaggcaaatattaacattctttgaaaggaagaccctaagcagtcagagtggtagattaagtataattaaaatagcttcataaaagtaggaaaaatttagcaaaaattatcaaaattatatttttccaaatttttgtataaccatcaatgtttattcaaaaatagttaattattactaagctagcttcataaaattttaaccagctctcttctcatttccatctccctagctacaagtttgtacggggcattacctatgaaaagctcggcccactgaggaggtgctgtgtctgcagcctcacagacgctgtatatgcctgtgaactatttctgttcctggctctgcagcttcttggaaaacctgctgtttgtctctattgttcagtgtagtatttttattaattctttgagaatttcatacatgaataccatgtatcttggttatttcactgctcctgtccctaactcctaccagatcctcactaccccacagggaaagctccacgtctaagatgtttgccagtgacagaaaatggtgatccttatcatctcagccacagaataccttttggggcaaaggctggtaaaaacttaaaaggaaagatctgggagggaaaaactcattttccataagtggctttgaaaagccctgccttcttgagggtcacacacatcctgagaagggcccatgaaccagcttacttggctacaatttagaaagtaaagactaagctacagagttgtaatgactgtccagattgccccagcagcagaaccttccagaaaagggtggcaaactcagtggctcgagagagtaaggaaatatgtgttctctagccacagcaggccactaatctaaagttcagtggttcaagcaattaacaaaatctgtgcccctcccctggcgggaccacaactcctctaaagcactaatgagaagctttagtaatgacatgggaggaattctgcaggctttgcaaagttaatctcaggaagttacctcatgacacatcccaaacaaacaaactatattttagcagtcacgtggcagagaattaattcagagggacagaaaagatttgtttctgaagctgctttgtattattttaaatgtgtgttgtttagaaactaaaaatattattcaaagaaacaggaaaatacagcccatacataggcagacaattagtaagtcattcctagtaatggcttcaaagatttaagactttaccccacaaggagcccagagaaaatagttttctgaatcaataagccgctatcttttgcatcactagtgcctgggcccctctaaaattacaattcttttgaaggctgcttgtgaactttcagaatggtgccttctgctctcaatacccagagcatgtgtgccccagctaagtctgactccccactgctctcatgagtgccaatacccacattgcgtgtccccaccgttactttctctcagaaccttattgattccagtgtttacacaatgactgacctttcttgagaactttatatctgacctctgcctacccttaaatttcctaggaggttcaagtagtgtctagctctccaaatgtgttccagaaaagtcatgtcctaagacaagtcaggaactgaagtctcctgtagttaacctacgtgagtggcgatctgacctcacagatcctgtgtaattttccacagtaacactgggtggttggttggtttggttgacaggatcaggtatcacgtagaggtttcttgtagaaatttctctgtatgtcttatgctgcagccattcactggcacagatgtgcccttaaaaccaatcagtgcccccaggtttctgctgttcatagctagacctgtttcttcaattctgcgttagcacttgttattgtcttctcttgagtcaccagactttatctcctagccactgcattctcccaggcctcctctatgggtgtgtgtagatatgggagctgccttagaggtgcttttgagactcatctatgctgaccattccatgactgtgctgaccatcctcccaaaaacactgtacacaattcctcttccttgacctgtcttcctacggtacccatccttgcagggtgaggtggggcctccttggaatcattgatgcagctcacctttcacagacctgttggccattcctatggatcccagattttctgtcagataagtcaaccatgttattataatgggtttcagatttattttgtccctttgtctgggacctggctctgtgtttatttttcttgatgttttgactttgtgtttgtgcattagcaaaaccagctccctccctgttcttcctcagtcattagcctggtcagctaagcagaggccctgagagcctccatgagatgtatcctgtcagctccagctgtctggcatgtgttctatctcacttcatcgcctcccctggcccccaggagggttgaggctagccccacaggcaaccctgtggagatgaagctttgatgtaactcttctgctcccttgaagaaaccatgaagctctgtcaccactgggcagggctgggacagctcatgtaatgctctttgttcttacctgtttcagagcacccttcgccctgtcctgtattgtcacaggtgagacagaacccagtgccatgagcacccacaaagagaccagtggggtggtccgccatctctcccctcagtggggtggtccgccatctctcccctcagcaggttttttgaacaaagagctatttgtgaccatgtccagggagctttgatgtgcctgggtctgagctcacacagggagagtgtcataagtgcctgtggcttcacatgaagggtgtttgtgctcgtgaggctgttggctctgtgtgttcatgggaagaggtcaccaaagcttccttttccaactctttctggcagtatctcatgtaaccatagttggattttttccctcacattctcaataataaggaaaaagtaaattaataaataagaaataagattattacaggtataaaataacagctataaggaagatagacatttagacaatggcttgcagtgcctgctactgaagaatagactttctggaagattcttcctgtattgaagaattgttgtattgagcccaacattttattgttgttttagagacacgctcttatgcggagagctggataatgggttcctgtctcacactcactgaatagctaaggatagccttgaacccctgatcctcctacctctgcctcttgagtgctgggattccaggcacatttgccaaagctggccttatcccaaattttttaataaatttgtaggtatcacattatgaattaattgcattccccagagaaaactagttgaagaaaaaaagcaatgagttattaaaaactgccctaaaatttttcctcggagtttaattaatttttctaaatgagttatgtggttaggccagaagtataatttataaatagacttcctcttggtttattagtgataggaatctgaagtcttccccctactttctgttccctaccctggagcactgtaactgtgcattttagatttataactaatgtccttgttctccttaggaaagtccctcaaatatgaagtatttctaaagttgatgagacattgttattttgtacaacagggagaacagtggtgctcttcatgtcaggattatttgggtagttttattctccatgattttataggctattctagacaaagcagccactgtaaggatttggaggaggaggagaaggagagggatggcttcctgttggaagtagaagacttgtgaggagctggctgtggttgtcctgacatgatcagtgactgtcatagccctggaccatcacctccagcgaacaacagctattttctggtcatttgctgctgtgtctaacttgacttgtaaggcaggtgctgccatcactccaatgtgtgctccttacatgggttcctgtctctgtgtgtggaagctagggatcaaccatcttacatcttggctttgctcctcactcctcttcaggatggactgtttctctggagtctgggttccctgataggcctggggtgactgtgggggaaccccagagacacctgtctgctcccacatgctgggattaaagcatgcctcactatgctcagggtttccttggggtctgcagatggaacctctgtaaaccttaaccttagatcctcgctcgggcttactgagccatccatgactccagccctaccctgcctgtaccacatgaagttacagaggttccatagctcatcctagtgggcatctgaccttgttaggttcaggctgcctgtctctagaggtcttgaagtttctcaccccaaccccaagacttctccacctcaaggtcctgtcttaatataaagtgtacattcatcttagatgggaatagataactgcacaagaaaacccttagctgaacactgtccttacagtgctctataatcccgttgcttgtaaagtaggtatgggtgcacagagctgagcaagtaggcaagtgcgttggcatttgtgaagtgttagcacagttgagaaggagccgtggtaaacaagctgagttaaagtggtgttgtgagatgcgaagggaaagaaaagcattacaactgcatacttgacagagtcactagtggagaagtccgtagatacaggaaggaagccagagtcggggaattaaaatgcaggttatatggcgccactcagaaaatcctgaggagagagctgtgacaggggttagacagtggttgccagggctgtgggagctcctgtcaggtgataattaaactgaattgtggtggcggttacatttggccagatctgtcaatcatcacagccatttcctagaatattgtggttttaagaacaaattcctattacaataaatttttgagaaagcatcaagttttgttaggattaagagtctgctttgtattaagtatgtgatgcctgttgataatctataggtaatcctagagaagaggttatgtagctggagacacaggcctattacatcgtgctatcaagaccctttgcacacatagctattaactgtactatcacaggaaagtgaaattaatcttgaggtccatcaacagatgatggatggtagaaatatatgtgaccacaacagcattttactcagatgtacagatgaaatttgcaggaaaacagatggatctggaaagtagtatattaactgaggagatacaaactcagaccaaaccaagccaaaccccaaagatgcaagtgctcacattcttgcttgtgtctagatcctagatcattctgtttatatggatatgtgtgatggacaggaggaaaagtgtgtagaggtgacaagagggtaaaatgctgctgagaggactgagggaagggcaggaagctggggggaaggggagggatctggcatggggagtgggtgggcatggttgtgggcggggcagaggaagggtgggcacaagtggatagggaaggaaaaactataacaagttctgcttggaagcagccaggtggtattacctttgagacattaaaggctaatttattactctagttttcaacttttcttttaattcttgaaagaaatactggtctgaagtcaggtgccacattagggtcctgtggaatggataatatacaggtactgtttagagcaaactaaaacctttctatacagggctgtgactctctttttatggagtgtggtcatcttctaactgtaaataannnnnnnnnnnnnnnnnnnnnnnnnnnnnnnnnnnnnnnnnnctaaaacctttctatacaggggctgtggactctctttttatggagtgtggtcatcttctaactgtaaataacagtttgcttcatattgtctgtggtagtggaggtgactgtgaccatacacttggattcacataggatgacagtaggccatgttgggatgcagaactacacccatcctgttggatgcttaaagtttcctgtgtgcacaacagaggccaatgctggctctgccatccctgttagcagtgccaggtagtatgaggtccccagaaagtggccccaaactctgtatggcccagccatttagagaaacaggagacctgaaggtgacccatgttgatgggaattcacaccttctcttggctgctgagtccagcagaaatgagagaagggtccaagtggcagaatcagcctcgggtaagcaagcctgagtgctagaccgcctgagaaaggaagtaggagaaactctgtagagctctctgtgctcattttggcgtcacctgggagacagggacacacaagcaggaaacacacgtgctattgtgtcaggggttatcacagagtgtaccctttagatatattcaagagaagatttataactcaggctatttccacattaagttaatttaaaatccttgctgaaggaggggtaatgtatttgtaacagatactgagctacatagaagagatggccattaactttagtattgttgcagagcattgtatggattctgtggacttacatcttgaaaccccacctgacactgtagactcttcatcagggctcataaccaagcacaggcactataatttgggcctatgttttctcagaagccacaggtattataatcagggcctaaattttcttgatgaaattgaacattgttacttaaccaatcttgagaaggaaatgatatttctgcccaggcttcccaagcaagatacttccccagccccaaacctcagtactgatatcttgagttttgatccattcatttattttgtagtttttactgaagtatttgataggaacttcatttgttcaaagttcattgacattcttaattgtcaagagtatagcatccagaaagaaacaatagcctcttccgcctctatggctgctgcctatttcattcaaagagaaaaccatatttcaccatatgcatgcaggttaggattcatctcagattgcccatctgccatccctatccccatgcctcttacattgtgcctgaaaattaacccattgaaaatgtaagctcgtcacctggtatggtaatcccaacctatagtcccagcacttgggaagtggaaggacgagggctggagttcaaagccatcctccagtacatggcatactcaaaagtaaaaagcaaaataaatgataaataaatcgataagaatagaatattattttatatgtattgttccctctagcttaccattgtcatcttttctttaaacttttcattttgcatgcatgagtgttgtgttttcacatatgttagtacaccctgggtctgcctgttggctgtagtaattgatgaaggcattgcatcccctgcactggagtaacagatggctgtgaaatgctgtgtgggtgctgggacttgaaccaggggaattatgcaagtactttctaagatcagctgcagatggaaacatagactgaaggacagtgaagcctctgctctctctgctctcatatggtgaaatatgggttctcaggtgcaaacacgagctcatggtaaacacactagatgtcgtcacgtttccaatgttctgaaagcttgaatgaggccaaattagaacgtaatgactgttgacaagagctaagcacccttggtcacattcaagagatagccttgaatatgacgcatccaaacaggagcattgcgaacactttcgggaaatggctgggtatttaacatgcaggaaaatggcttcctggttcatgtggtggcagcagaaatggggaggatgaacaaacaagcatggaaggagacaaacctggacaaacacagtggaagggacaaaactagcaactgggacagggatggaccccatacccctaagacctggacaaacacggtggaagggacaaacctagcaactgggacagggatgaaccccatacccctaagatccacattgtggccaggacttggggtgtggcatttaagtgtgtttctcagcttacatctgaagccgaaaaggaacacgttaattcagtgaaaattcaggatcatctactggtgccgtgctttggtgcctgtaggagccgtcatctctggcatttctgcatatctgaaattgttgagatctttagagttacatgtgcacctccagtaggaagaatgtggagtagagtcagtgccattttcccctctcaaagccccaagccaatgtggggatgcccgagagagtttccagctgggagcccactaggagactccttagaggcaaggtttggcttcaaactgaacaaaagactgaatgaaaggagaaggcaaggtctcccagaatcagggcagcagcccctttatagctcccctgaagtagagtgggccagcaaaggtgagtgcctgtgctgagtgttgaaaacctagccttccccagcaacccacccccacccccaccaagctcagtttcacaaggctgagggccatgagaaatgaaagatttttttttttttttttgaggaatctggacagccaagataacagacctaaatacattgttagaagaaatggccccaaggaagtgagatggacagattgctctgttcttaaggccaggccacaggctgcagctgcaagcactagactatcacctttcttttgtgtgcaatgctttaaacacagcagagtcaagtatgaacatagatggttgctcatgagcacaaagagtgaaggaaagatttgggggagataagaagttattaaaaactccccttgatgcctcagacagagttgtgcataccaaacaaagaagagtctgtgtttccttttaagattttttttttaaattttattgtatgggtgttttagctgcatatgtgtctgtatacaagtatgcctgacacccatggaagccagaagaaaatgctgggtccatggaactggagttacagatatttgatggctgccatgtctatgctgggaattgaacatgggtcttctggaagagcagccaatatttttaactgctgcaccatctctctagtacaggaggctgtacttttaaagcaagagaataagaacgcatattaaaaatattaaactcagaagtcaaaagacaaagttgtaggtgccttccaggaaggagtataaacacatgtggccagttctggtccctcagcctgtcaccatcagcaaacccacacacacaannnnnnnnnnnnnnnnnnnnttccccagcaacccacccccacccccaccaagctcagtttcacaaggctgagggccatgggaaatgaaagattttttttttttgaggaatctggacagccaagataacagacctaaatacattgttagaagaaatggccccaaggaagtgagatggacagattgctctgttcttaaggccaggccacaggctgcagctgcaagcactagactgtcacctttcttttgtgtgcaatgctttaaacacagcagagtcaagtatgaacatagatggttgctcatgagcacaaggagtgaaggaaagatttgggggagataagaagttattaaaactccccttgacgcctcagacagagttgtgcacaccaaacaaagaagagtctgtgtttccttttaagattttttttattttaattttattgtatgggtctgcatatgtgtctgtatacaagtatgcctgacacccatggaagccagaagaaaatgctgggtccatggaactggagttacagatatttgatggctgccatgtctatgctgggaattgaacatgggtcttctggaagagcagccaatatttttaactgctgcaccatctctctagtacaggaggctgtacttttaaagcaagagaataagaacgcatattaaaaatattaaactcagaagtcaaaagacaaagttgtaggtgccttccaggaaggagtataaacagatgtggccagtctggtccctcagcctgtcaccatcagcaaacccacacacacaacttcagaagcgtggcctgagatcccttcttgtacctgagacacctttgctagataagtgtggctgccatctctcattagataaagctctatttatagaaagtggagaccatcccagaaaatctgtaactggacccactgaaatgatcagcagattgtagggcccatctccagtggatatgtctgtaccacagctcagcattcacagctcaggcaacatcatggaagaggggcagaaagagtgtaagagctccaggaatcctgatgtgaaacagtctttcctagaaaaggtttcataaacaagaccaagaaaatggcaatatcagtaggctggtgctgaaatggagggtgggaaacctcatgggtcccaccgtgagacagagaactatgggcaactaatgacttcttgaggaaggagaggacttctcaaggaaggagagagagtgcttcttagggatgggtgatgttctggatcacacccagtgcagagtggtcagccctgaatccacatccacccaaacagaaacagattcaaaggtgtagttttatatatatatatatatttacttacatctaacataaggtatacgtaacaataataaagaagctgtcaatttggaagtatggggaggatacagaaggaaagatcatagatggtgctctagagaggaaaaagatggtgatataattacactttaattaaaatgtataaattgtaaaagttggaatgataattttaaaagctaaaataaatgcatgcagatatagtaaataaccaggcagtccattaaacgatgctatagctttatggaactcagagcaatcaaactgggaagttgtgactccatagtaattttttttcattactttattaaatccagaattaaaatgtgcagctttcttgactattaaagcccatgtttggatcagccatagctaggttcataatgaaacttttgagaaatgaagaaatatgtaagtattttcttagactcccaacagtaggcccagcctgtaacccaaaggccccactgccccaggataggtaggaattgagccaaataaaaaatttacttaagtttgatatttttatagtttttttttaaactcaaactcatgattcttgagtgtgacctccattgcaaggtgtgcagtgtcaaaaggttggaactctagagtaaaacccagcagtgcagcagcgaggaggagccagccggatcaggttctcaacagtgtttacagctacagaagtgtccagcctagaaattcagatcaccagctatatgatgaggacaaacaagggtgttttcagacaaagcacatgccacagcaagaacctccaggaggagacagtttgccaaagcaaagatcaaccagtgagaagcagttctagagactctgatgaaaagagatgcagagaatcccaggggtgtggctgagagggagcccaggatatcagcagcagtggccagcaaagccataagaagtgcctggtgccttggatgttcccgagcaggccacagacaacttgagagagaactgggaagcagcatgatgacaagagctggtccccatcccctgactgggcctagacagctccagcctttcactctttgttctgaaagtacatctgtcttttctgcaaaatgatgaatgaatgaatgaatgaatgaatgaatgaatgagttgaatgaatgaagaaatgaatgattttaagcatctttctttctagaggatggatgaccaagaaaattaaacaatctgcccctgcctttgatgcacgtctttttagcccactgtagtagtggacagtcatagtaaactccgcagctgatcaatgacagacccaagaacctgtagagctgaggccgcccagttccccagcatggagaaccacggctgaaaccaggtgctggcaaatgcctttctaacacaccagggactaaatcttacagggtttctgggccaagtaaaacaaggtttttactgctgtgaacatattaccatgaccaaggcaactcttgtaagggcaacatttaattggggctggcttacagattcagaggttcagtctattatcatcaaggctcgaggatggccgcgtccaggcaggcatggtgcaggagttgctgagagttctacatcttcatctgaaggcttctaggagaagactgactttctggtagctatgatgagggtcttaaagcccacacccacagtgacacacctactccaacagggctacactttctaatagtgccactccctgggcagaccatataggaaccatcacaattgttaaggttctaatacaatggggaatttttataacagtggtagaaatcagtatatcaataagcaaataatatatcagtaagaaggtagtctgtttgtttttgaccagggcagactctctagtgcaaagaataagattctctcctgagggtagcattttgcttacgtgtaattcagggtccgctgtccccatcctctaagttgccagtgctcaatcctgcctcacacagcagtaagcttccaagctggtggacagtactggttcctgggtggcatttcctatagatggtctccttctggcattcagtgccagtgcagactaattcaaagttaagatgattttgcacagtacatgcattttgacatacacaattttccttttcctccatcagtgtctagaaaacacttctgaaccatagtttgagctttaagtttgtgtggaaatggaagtctcttgacacacagaaaagtacaaaaaatatctgagcttacactctgctaattgaagctcagctagtgagacattttatagtacagtgattttacagcgatagggaaagtgagcctgggttagcaagcgctctgtatcaggtcacacccacagccctcctctcacttattttaaggtctcaccacattttttcaggtttgctttgaactcagctcccccttccagagacacccacatatctgtcacttttattgttaatagatatataataaatccacatagttatagtgtgatctaatgtctcaatacacttatagattgtgtgttagatcagggtatctgacatattcctctcatccttatatttatcatttttattttagacagtctaggtcaatattttcactgtagtcaccccaccgtactataggactccagaactctctcctccttgaaaacagtcttcttccatacttaagaccttgtgtgtgtgtgtgtgtgtgtgtgtgtcactgagttgaaggctgaaagtccagcaaaggcagtattgccatctgtctccagtgaggcctcggggtcctgtcactgcaggccagtggtagaacagtggttatgtaaaagctgagaccttggtgagacaggaactgaggagtccagggggcctggactgctttttttatagtaactcaggcttgcaggaactaagagcctattgggacaagacccttctgaaatttctcagtgatgaagctaccgtccatcaggacctaccccttaatgctacagcagggaccaaacgtcccttatgggaacactgagacctaaatcttctacccacccagcttctgttagtgctcaataccccaaatcatacacctaccccactgaaacagcaatgtttccactcactacgttttttgcagacttactcctaactctaggcaaatccattgcctgcattgctttcttggcatcccacaaaccactctcagagagctgctggctgtagacacaggctaacccccttctccacaataaaagggaatgaaaattcactcacactcctttctctgagcgtatttaaaagggagtttgaagagtatggtgagaaaatcagatggatgcaggctttggggagaggctaggatggctataggggattaaccatttgtcaacctgaatggcaggaatggaagccagtgcacattctgtactgagagccctgcattcaggagagccctagacacagtcactgctgtgtggctttgcagatatatgtttcctagaaactcctgaagttagtatcagcatcacccattggcccaagtgtcttttgaagtctatgtattaccccattgtttctattctgtttgtgtgggtaagttacaagcttgccaagagaggacataggaggctccagggatgttacacttactgttgggtagttagcagataatttgacaaatggacacatgagcaggctgctgaccacagatgagaactctgtggcatctgaaacctgacactcacctcttgtaatcacttgctttctatgcctttctgcaaccatgtgtagaaataaaaaataaatcatgctgaaatcttaatcataaatgtggtttactaattaagaactggtaaaagaaatgagtctttacacaattgtatcaaggaatataggtcatataataaaagaatataagccaaaaaaaattactgggagtctgtttcaggtgaaaactttcagtgatagaatgtgcggggtagtcctatctgtgcatgtccagttcccttcctactctactcatgtttgcatgtttatatgtttgcatgtttacagctcgcatgcatatgcttacatgtttctacatatatcactgtgtgttcatttcctacattctacagaatttctacagtaaagaaacttgtaatggtgcatcattattttacattttctgagttataaatgcatgtctaaactgtttgagaaaatatacatagaccttacggtgggaagagccatgaagaatcagaagtgaagagaacactcattggcgctgtttcccaatgaaaacatgccaggcatctgtgctgggagttacgtacttgtgttctctagcattcatttgagtcacacactagtttgtttttttttttttaacttttaactacaaatataccaatagagcactattttgtagaaaatattgttgctttctgagaagtctgcccttcttggaatattagctatctataaggcattgagttcctcttccctccctggagctctcatttcagatagcagctaacaggtggagtcttacggtgtccagctctcagcagcttgacctggctaagttatagctaaggtagctattacttactacccagaccacatctgatgactgttgtgacagagctcaatgtgggtgaaaccactggattttgggatgttcttagaagagtacgcattgagtttgaagtcttgtatggatatagaggacagggaggcagttagatgaagagaaagcaggagggacaggctacagaggaaccaagtagcctctgctagcctcatcacgtcctgcaagaaatggctaattctgtttctttcctcctcatgcctctaacagttcccaaaagctgttatacaggctattcctctgtacagactggcctggaatggatcgagctgcacctgttgagagacctttcacttctgttagtggtacagtgcgcctggggcatgctacactctctgtgctctccttcccaaacaggaagctgtcaaggccgcaatcgtagaggagcagaggagaagtgaaaaggccatggaggaagccgtaaagagaacaagggacgagctggtggagtacgtgagggagcagagaagggtaagtgtgctctctggtcccagcattttgcctctgtggcagcagaggcctccacacatgctgtggtgtcaacacacatgctgtggtgtcaaggtcttgataaatgcctcagagtatagtgggtaatctccttggaaggtggcttccctgaataatcatatattaagcagttatctctgtaggcatcccatcagacaagaacaagcatcagggagcagcttctggctgggtccccgagtcccttctcagaatggtagttcgagacttgtaggaggggcgccgccatgcatttgcagatttgtatttacagatttgcatatgcagatttggtttgttgtattcatatattttctttgttgatagacagcttgtttctccatacttaatatatttttccaaatcaaccaacctatattggagatgttattctagacagagaatatgtaacaaggaaaatttacaaagccctttttggggtaattttttaaattttttcaaagctgtattactcttctgtcaaaggcactatgtggattctcgaaaagcttctaatgagagtaagaatgctttcttcaggtcccttgatccctgtgtgtcagttgtctaaagaactaattatagattcggccatttgacctgtgttcttttaaatccttctgggcgaaacgggcgtcagttgcttgtttgtgggaagtagcctagtttgacttgtgaagttcattgacaagagtgtcagcacaacagaacaggccccgtttgcactgcctgcttctcctcctgctttggctgtcagtgtgatgacatggacacccacatattgcctgccactttgtagagtaatcatgagtcagcacatggaacacagcaggtggagtaaggacgctctctgtgctgcatcagtactgttctgaacattgtcttcacgttcataaaaatacccagaaaccacttgttgctgggtaggtttcacagacagaaatgtgtgctcaggatggtgctagcactgccatctgcggggtaagctctgagaccttaccccagtcctgtcaccgatgcacaccaggtcgcagctgtgggcttgtggggacgttacgaactttaaataaacaaacaaactaactaattaactagaacaagcttgagattcttaacttcagacaccttagaaacctcttggttccagcagccttaagtttcagtccctgctctgtggggcattgttctggagaaggttcagctctggggtcctttagctcttcagcgcttccacaaagcctggcaagtttggaatgaacatttccctaccccacatgtcttcatttgcttctacttctaacgtacttagaaattatgggatggaagattcaaaatgctaaatttctctaataatttaattttttttcatatactatgaaatacagatcaccataagaggtaatagcttcaatcgttcaagactactaactgctaaaatacaccaggatggagctagggtcaatatttttcattggaaacaggtctaatggcatttttgttgtttatgagtgtcatcaacagagatgttactaaactttgagtacagctgtcaatcatctggtgcaaacttctagacttgcttgtgcactagttatcctcggatgcctccagcaccattcactaagtcagtgacgcaagtctgcactgctaggccacaccacaaaaaacaattcctactactaagaattttcatgattaatcagaaaaattaatgagacagtttgtatgcttaatatatttagcccaattgtattttaaaagatttctctgtaagagttgaagagccagggttgggacacccagaggggccccacccactcagaggagaaggggatgggggatgagggaagggcagtgggagggggcagtgagtaagatataaagtgaataagtaaaagagataaaattaaacttaaaaaagtttcaaaggaatctatttctgcaaaacccaaactactaccgaagggaaaatgttatgttagttttctaaatttggtatgaaggagaaaaaacgctgtcgatttttggcttagcactccaaaagttttccatagtatctgcttattgtctgctagtcagtgggcttagttatctgtactatgccatctcttactgaagcagcactgccttcagtcaggggtaggagggctctccaccctttaacactcctgctctcccaccatggaactgtgtagttggcattccctagtgttctagagatgtcttcccttcatcatataaactgccaggcaaagtgatatagtcactagtaacacagcctttgttttgtgtaagggaggttacagagaaacggaaagacctcatcccagacgcttctcgggggaggaggagtttgtggtttatagagcccgatggcccttagtctcgaatgaggagttccagcccatcccataggttcagactgttacgcatgagctcgctgggacggaggaagtgtgaataacatccagcgagcatcggccactcacagccaggcagaggttcctaaaaataaaatctcatccaaatgtaataaaggattattattttttcctcttaagaaccagaattatggcccatgttttcaaaatcacctccaggaaaataaccttcacttgggaggatttttttaatttagatttttttgaagggagtaaggagcaattatctttacttaaaaggtttgtggccaagacactgttagagatttttaattatggctaggccttgatgcagtcccctgagattttacttgaagctgttacaagcaacactgagccaatgggagctttacttatgatagttacagttactagaataaagacaactctagagaaactgtcacaccactgctttgtctgttctctgtcgtgataatattgacacttctgctgttctaagtcccttcataattctgacattccaccaagagtgttagcgacatgttcccgacagctgctgagtgtgctgagggcttttccgttcttggtatataaatcagttgcattacggaagttattctttacattgtttgtaggtccgtgtggaggcagtgccattcttctgtcccggcctgcctgccccacttccctcaccctaatcagtcgttcctcctgagtggcctggaccagctctgtagacagaaaaagatgaacccaggagtatgtcagtgtcaaggcccacaggacccactgtggcttttgatttggatgtcataatttgagattgctttccttaaatgaggcacatgacagcgaggactgtgccctgtcgactggtttctcagttctctgttttcatttaaaccgtcagagtcagtaaaatcagccagtacgagctaccttgccaagtggcccccatgaacatcctccctgaaagtgaagcataacacatttcaagtagaagaaagcttagcaaagccaacaatgtgtgcaggttgaaagggtcctgcagctttgtagtcagttcaagtgtgttctgcgctgactgctgtcctgcatccctccctgagggtctataccttataaatacactgaacctcaagcctacctccacgtcaccttcttgacctgcgtttctgatctaaagtgtccttgcataaggtcattcttgggaatattcacagacatgtgagcagggccgtgccatctgtctgtccatcagaccgtcacatacgaccatcacacgcctactgaaggcttatgattttgatgacattattttgaaatggttcaaacagtaagtgttgtactgggaatggctaaaagtctcatggtacaagtaaaggatcaccaagaacaaagagattgcatctggaagaagttgtggaggtctgaagtcagaacttgataaccgtggtgatgaagccacttgtatgtcatctcccaaagctgcccactagtctaagaatatctgaggagagagcatgtggctctgcatctcctcaccccagaagccagtagtcacagcctccaagtcacagaggcagaaaatggcagtcagattccgaagtctgtgctttgactttggggtgggcaaaatggagactaaagaacaaagctagacgtggtggtgttctcaaatgaaagacacaaaacctctatatttacaataagcctcaaagcactagagctgggcagatatcaaccctctgtgctgttttgtttatttctctctcaggaatcccgagatgtcatttgccatgttcttcctgggtcactcctactccaacaggctgatccttatgatcatgtgttcatgaaccatctcttctcataggagcttcctccttctccgcctcctttcttactctccatttctccttagactccaagcctgggaaccaaagccctgcctatctctcttgaggtttggtctgttgctatgaattataatgccaaattttgtagcccaaaggtctagtagcctataagcaagtagattcttacatttaccaacttttgttgcacaaaccttgtcccttaatttaaaactattggttatataaaagtgtttacagccagtactggagggattagaggtaggcgggctttgagttacctggagagaggagaaagaagaagggcttgggagaggaggaagccacagagaggaatatacagggcacacagccaggagaaacagcaagtctttggggtacaccgcaggggaggtagccaggccaacaattagaaaaatagattacgggttgccccctccccaggaattgtcggagccaaatagaataaccacagtctgagtctcattcattcataagctagacaggaataagtttacattggttcaagtacagtccagcttgatgacaccagtgagtcttctgggcttgcttacagagtgcagttgggggttcctgcaggagccttggtgacccccaaacaactgcatcactacagagtccccgccccccatcatggattgcaacctcaaggaagctacatcatggattcctgctctcttcagcctctcccaggatctcaggcagctctaccaccagtaccgtagacctgctccccaccatattgttctgctagttaccatgcccattgggcaaagacctagggtggcaccaaggatcccaggaaaggtggtgtacagcaaaagttgtatatgtgtttaagtaggctagcttattcctgtaagaaaccaaatcttctgttttcacaaagtgacctttctttactgcagaggcagtccagggttattttctatttcgagtcagaaacccatccatggaaagtagctcattccttccccgctatggtcagactctgtttcaccaacctctgcctgtctatcatgcctccagccatatcttagcctctcatggatggggctaaggatttgctcagaagcctctaacaggactttacattcttcagcacttttcttcacatggggtaatgccaaactcactttttatcatgcttcccttgggcactgagaaaaagaagagcctaccatgcagagcctcgctgggtctccttgaagtgtatccagacatacaagttggtatttaaaataaggttttatttggtttgcttgtagcaagttaagaaaaccgaattccaggcattgatctaattttcacaagtttcttgcagaatgtctggaaacacaatagacattatgaccatggatgtcaaagacttggccactaggaattgggtacagggttgagatgtagcagtgacaggtcaatactattcatgtgttgatgaagacctgtgtttaccattctttgccttagagagcccgtgagtgagtcaggtactacttttcaatatactgcctccagaaattatcatctcatttccttattttccatagaaaagaaataacttcactgctaaattataaaaaaaataaaacattctagctagcccgtataaaagacacacaattcaggtattttatttataagccataagcctagattgggtgggcctggaactattctatttctcagccgtaatgtcccttgttcctcctgtccatgtgctcatggtccatctcctctcatggtggtcccctccacctccgtgtcatttcttcttctctctacctgaaactcccttactctgtctatcctcaagtcccgcctttctccatccattgcccaatcacaggctctagccttttattggccagttaattggggagcaagatttacatagcatcactaggtgcaagtgaggatctacttgcgtgcagccagtatttagcattagattgcaagcagcatcagaccaacctacgacattaagacactctacaatgtcttaatctgtctggttcattttggtgttatttttttctatcatgtgtatctccacaaccaccattcattttctttgaaaaagaaaaatattggccaaaaattaacaacagaaaaatgccatcataactaatactgtcttggaaacatcatgagaacatccttttctaagggatgtggtgtctcttctccttcaaagacaaactgacctctgccagtctgtgtgctgctgagtcataagccacagtggttgctacctctgggagctcacttccaaaggagagagagaaaggtcatctctcgtctccatattgtttctgaatgaagtcccttgtttgtgggtatatcataagtctggctttgcctttgactaaaattacagatatcttttactatttcttaagcagggcattctaaccagatgatcacaggggtacttcttctagaattcatcagctttgggactgtggcgtcctgnnnnnnnnnnnnnnnnnnnnnnnnnnnnnnnnnnnnnnnnnnnnnnnnnnnnnnnnnnnnnnnnnntgtttatggggatccttgtgctagtaactcctggtcgtcttcttccctcactgccagttggtcaagctgtgattctatgaatgtccatcatcctctgccgtgcacctcaagctcagagctcacattgccttgcaccctgtaaactcattttaattgttctttttatttatgggtatgtctgtgtaagtttattctaccatatgcatgaaggttcccctggagactgagaggacatcagatcctcctggaagtggagctgcagatggtgaggcaccagtgtgactgtggggacaacacccaggtcctttctttcagcagccattgattataagcattgagctgtctggccagcatctaaaactaatttttattataacatctatttctcagtgtttaaaattcacctaagatgagatgctgcagcctatttgaatactgcccatgagcacacgcacatattctcaaacaggaaggatgtgagaaatcaggacatattacaaattaccaccacatactttgggaatttcttccaggtcaccatggttactgtagaaatatttctagtttttctatcctctcagctacttctaaaactgatcctttgaagtcatgctgggggtggcgtggccattcttattaaaacagagccataagaatcgtcaggcatcttagtgaatgtttccacttggccacaacagtaatctgaaattttctgtagctcatgcccaagtttcataacatgttccagaagctctgcagtgtttgacagagaagttatgtctcgctgggtagtgtcaggtgtctgtgattctgctattgtcttgctttaaccccccccacacacacacacacacacctctataatttgggatattttctgagtgacagtctcatagttttcctcactgaaggctcaccacagagctccctgggataaagagcctggttttccacagaattcattgggttaaatcccaacatatttcctggcactctgaacatctctgttctctatttatgtctggctctcatcaagggtctcttctttttcttccttttctatgcccttgccattttaaacctgttccctaggctgggggctatagctcagaagcaaaatgcttgcctagcttgtctaaggcccaaagtacaccaaggaccatacagacagacagctaacaaccagaagactaccttagcatgctctctgctttattcaacacctgctttaagtataaaacaaccaagctgagacacaggcagccaagaggagctgatctaagcctgggacagtagagcctgggaaagggtggctgaagttctagctgtgtgaggtggatttgctcactgccatcttttccttgtacctcactgtttgatcccaagattaatggctcccatcagcacgtggcactgatcttcatgtgtagaaccttctacatagttttcttgatgtagtcttcagatagatgctttctgagctctgtatctgaaatgaaatactttggaatagttctttgactatggactaacgcttgtttatatcacattgtagctcaggctgccttggaacacattctgtagccccaagctgccctctagatccaaaagagccctagataagatgtcaggcgtgcctggagcataggcttacacactggttttgtattccttgaggcagtgctgattgttgacacctttgggccacaggaaggttctttccaggagggttgcatttctttgtagctcctgccatgtgtggtgtgtgctagggtgaaagcaaagttgaaacagtaggtagttgtgtatactttagttcagcattaattagattaaacatacacagccactcagggtcctggttctttgcttacaaatgttagacgatagtagaccagcccaactctaggaaatggaaatttactgaaaggcaacagagttcattggcatctatctgtacaccaggctggttaaaaggaaatgaagcaagatgtcttggaaactacaggcagcatcattaatgatcatcttagatgacaaataagaaaggagaaccctcccccgccacccaattctccatagtctctaatccacttgggtcagttgggaaagacaaacactccttccacagaaggaagaattctcaaaatgaaatttaagttgccactagaaaagggacatcaagcctagttagtggccaagcaatgtgttcaatacactactgtgtctctggtttgtgtgactgactccccagagaacctgttcctggaatgttatgtttgttcccgagtgcatgccaaggagagagctgtttattcctcactttggatgggagaaagaaaaatttgaataaaggtgggaatctcactcaagatctgacaggaccaagatgggagagagagcgttcccaaaagactctgcagagctgggctgtatgttcagacagccatgacagtgacttggtgactcttaaagcctaaaatatctgctgtctggccctccaaaaacatttgtcatatgctgatagacaaagtaaccccacccccactcatagacttgagccttcaaaccgtgaaccaaagtgcaatcctggagaaactagatgcgtaagatgtattgtctacttctaactaggtacaccttctttatctaccagtatttagtactgctatcaggtcataaatccatccatgaattaatccattgatgaggtcaaagctctcatgatgtacttgccccccacccccccaaagcaccacttcagacattagaaccaacccacatgagcattgtaacaggaccaaccccaccacatgtgagcatcaggatcagtcttcccacatgtgagtatcacaaacaggaccagtcttcccacatgtgagcatccacatcaggaccaatcttcccacatgtgaccatcacatcaggaggaccagtcttcccacatgtgagcatcacatcaggaccagtgttcccacatgtgagcattgcatcaggaccaatcttcccacatgtgaccatcacatcaggaccagtcttcccacatgtgagcatccacatcaggaccagtcttcccacatgtgagcatcgcatcaggaccaaccctcccacatgtgggcattgtaacaggatcagtctcttccacaagagcatcacacaaggatgagccctcccacatgtgagcattgcgccgggccaaggcacacatttgctttttgaggggtgtttcacccaaaccacaaccagctagtcttctaaatgctggcccaaacagagcctagacaaagctgccccagtaccatacccactgagtcagggaatagaccttgaaaccatagaagtaaacataccagaagccctgtttctttagagaacttacataaaattgacaggaagcaaaatattactttgagatgacctggaaagattaggactataagtgaatgttgggagggaggaatgagaggttttccaaatgaacagagccaacatgtaggaggagctgtgagcagagaatggtcaagtctagtagagcatcccagacacagagcatgccaagcacaaagaggtcctgaggggagccttgagagacatccaggcaggcacaggacagcaaagaagttgagcaagagataaacggcattgagtggcagcagaaaagaaaaaggagaaaattactttggagatttgaatattttatcaaatactataaatgtgtcaaataaaatatggataaaaaattgagtaacctttaattaatatctgagtctatgttgaaggaactcacatatcattttaatccctagaaaggatggatagatttatgactgcagcagttatttttaattaaaatgcacatattcgtgtttgagatgtaagatacaatcatcccctggagttttatggctaagatggagtatcagacctgaaaggaggcctggaggacacttgtggaagttcctaaagagatggaacaacgtaaacattatgtctcttcaaaagtaattattagcgtggttttaagttgatgacagcaagctgtagataagaaacccagagaatggaggctatagtcgtgtcagaagcactgtggacacggagtcgcatcctttgaagactctcagagcacatttatgagcaacattgctctttctacagatctttattaatacctatggttatggatcctctgccacatgtgggatttgggcattggcagttactgatggtgacccaagccctgtattttatctgggaattacatctataaaatttctttcatattcataaagcgtgcttcatttataaccaaggcactaccttgcccacagtgttctggtaaaatatttccatgggcttcctctcactttgttacaatttatacaagcagttctgtctgtaaaccaaatccttttgtttttactaagtaaatttgttcatttcctatatgtgccatggttgcctataaaatacatactgttttttgaatagttcaaaacactttgtagagtttattatcaagtagttttggtagttagtcatcctttgtcatttgtagctatagttctgatatcttacttgataaatatctttcaactctacttttgttaccaaatgttagcttgaggcacatgttgtttagaagtacatgttcagaataatcaggcattataatgaccctaaatattcactgtattcccaacttcttgcctccaaggggcacagaggtaagaacactgcctttcagggatggatttgtttatttttttttgagctcggttaatgtgtttctttagcctctcccctagctttactgtttgatcttgacaaccaaaatcctttataatctttgtcactaaggagtgcttagagatattttctgattaatttttatgtaaatgttttcatataccttaaaaatatgaattgattttatgtggtgtgtgtgtgtgtaacttacagtgtccacagagaccaaaagagggcattggatacccctggaacctgaattacaggatgttgtgagccaccatgtggatgctgggaagtgaattctggccctctggaagggtagcagaaattgtagagcactcataccaagcccttggaatcatcatttatttgggaacagatagtcttttgctatattattcattcattttacagaacttaatgaattcctttagaaagatcacttcccactgctgttactgttacttccactgtatggaagtatgaggccagactttgctggttcccagacaaggactctgttctgttttgctttgacttttgagatagggtttcactctgtagtctgggctggccttggatttaaccaatccccctgcttcagcctcccaggtgctaggattgcaggtatcttcccatgaaaactgtcagtgaagctgaagttatacaacccttatgaagagttttaaattaacaactatggaaggtcactggcattgtctatgcaggaagccttgtggagtgatcttgagacagtgatagagtcagtcctgcaagcacagaagtgccagacagctgctggtggctctggcatgtcactggtctgtcactgtggcacttctgggatgtagcccgtctatcaccctggcatttctaggatgtagccggtctgacaccttgccacttgtgatttcatttcctcctagcaggatgcagaaacaattctttatactcttggaaatcatgcccttcccctgagcaagctccaaatgtgtctcctcctcagttcagaactcttggcagaatgagcaccatactggtgcctttcagactaaactttgaactgctggactttagtcaccttgcctttcatcctacatttaaagaaagggctgtagcaagtactcttccaggtgagcagtgaggcatggtagtagttttcctccccagacattacccttgccttaccccatttcttttatacctaaccctactgacccttactttaaggccctttctatgtatttgtaaggtttgaattctgaaacgtgccctctgcaaatatacttttgtgctttctttgaagaagtaaaagagctgtgaaatgggaacttgttagagcttcttatgttcgaccttcataagagggtagataggacttccagccactcagggactgtaagatcagactggcagcttgccatgtgtaccttgaacagattttacttgtagagggccctgttctgtgtattggcatttctcaagaattttaatatgtctttcaatcaaaggaatctgggcatgtattgccaagaccatcgttagtctgcatctaagcacagcgacagctgtacagtaaagatggacaggtcactgagagggtgatgtaatggaatttctgtgaggcaagggtctgcaggtgacttaccacgtgcccttcagttgacccgccccttccagtccctgcctgatgtcatccatttacattaagacagaaggaaagttttcccatctttgttctgtccccttaattaacttggagaataaacttgtacgcacagatgcactctggtgacctgaggctaagcccacttcacactcacttcctcgagtgtgcacttaagttgtcagaaagggtattcctgccccttattaatcctgtctcccagcaccaatgcaatagagtgttgggaaaaattggttacaaaaaaaaaaagaaagtttaagtaacttagccaataaatattaataattaattaagatatgtagcctaatatgtataattaacctataaatattaagagggaagggggaagttttatcagcagagaataccctaagaggggacaggctgattttgtttgctttgttcttaggaatactctttttaacttgtgtgagatgaatataagtcaagtcatgagatcagagttacttaagttgagaagaaaatgactaaaataggaacagccacacatgagagcgtctatgtcaggcttatcgattcattatccgcccccaaaactaccaattctgctttgtagtgcagtgttcaacagacattagaaaactaaaacacatcattccttccttggtgtctctctccccttcccctccccctccctctctccctctctcctccccctcacccccaattgtggcccaggctggccttggggatgtttatcctttagcctgtcaagttctgacactacaagcatgtgataccacacctagctctctttgtagactcctaaattattatcagaaattatgttctaatgattgcttgttcaacccctaagttaaagtttccagctcaacaaaaactccagtcttgtccatttaacatgttgagcttgttcccccattcttgttcatgatctaaaagctgagtttttaaggctggtgaggtggttcagattctacagtcacctgctgctctgccatgagcaccatcatcgggtggctcacagatgcttttaactacacacacatgcacacgtacacatacacaaacaaacactcaaacagacctatgattaaaatcttttttaaagttaaagtaaatcagcagcagtttaaggacatttggaagtctgaagtccagatgaannnnnnnnnnnnnnnnnnnnccccatgtggcccaggctggccttggggatgtttatcctttagcctgtcaagttctgacactacaagcatgtgataccacacctagctctctttgtagactcctaaattattatcagaaattatgttctaatgattgcttgttcaacccctaagttaaagtttccagctcaacaaaaactccagtcttgtccatttaacatgttgagcttgttcccccattcttgttcatgatctaaaagctgagtttttaaggctggtgaggtggttcagattctacagtcacctgctgctctgccatgagcaccatcatcgggtggctcacagatgcttttaactacacacccatgcacatgtacacatacacaaacaaacactcaaacagacctatgattaaaatcttttttaaagttaaagtaaatcagcagcagtttaaggacatttggaagtctgaagtccagatgaatacaagggccaagtagggtctgacagcttggagccactggggctcggtaactctctttggccagggtgcttgggtataggtactctatctggtaagggtgcttgagtctgggtgttctctctggccagggcacttgtgtctaggtactctctctggccaggtcacttgggtctaggtactctctgtagacagggtccttgggactttatacccttgttgtttgtgcccactgtattcataacatctaactacctaattcatgcaacactgccagctcattctccagcaggtacatctttgaagtggggtgatgaaaaacacaagaacataaatagcaaagaacagatacctgtcccctataaggctctatcttagagctccatcccagtgactttactttctacctactaaccccagaaaccattttgggtggatggtttttgtgaactcgacacaagctagagctatttgggaaaaggagccaaagttgagaaggtgcctctattagatttgctgtaggcaagtctttaggagcgttttctttattagtgattgtaggaaggcccagctcactgtggagggtgctgcccctgggcaagtgggcctgggttgtataagaaagcagactgaacaagccacaaggagcaatccagtaagcagcacctctccacagcctctgcttcagttctgactctaggttccctgcctcaagttccttccatgattcaccttcatggtagaatacagctgtaagctgtagcaagaccttttctccacaggttgctgttgggcatggtgtttatcagagcatagaaatcacagtaggaccaacagtgacctgaaggtgtgtgcactgccccccagatttccagtgtaggtgaagaggtggcaagcacgcatcactgtaaaccctgtctgagcaggttctggccctgttgttatttcttctttttcagtatcttctgagtttagcttggagtgaaagcaaaacctccttcatttgtactgggagggaggaacgtattgcttcctccattcccagatccagctgggaggcagcagtgattctgagaagggacaacagggaaggatcttcctccctccattttcttgagagcaaaaatctgcttaaaannnnnnnnnnnnnnnnnnnnnnnnnnnnnnnnnnnnnnnnnnnnnnnnnnnnnnnnnnnnnnnnnnnnnnnnnnnnnnnnnnnnnnnnnnnnnnnnnnnnnnnnnnnnnnnnnnnnnnnnnnnnnnnnnnnnnnnnnnnnnnnnnnnnnnnnnnnnnnnnnnnnnnnnnnnnnnnnnnnnnnnnnnnnnnnnnnnnnnnnnnnnnnnnnnnnnnnnnnnnnnnnnnnnnnnnnnnnnnnnnnnnnnnnnnnnnnnnnnnnnnnnnnnnnnnnnnnnnnnnnnnnnnnnnnnnnnnnnnnnnnnnnnnnnnnnnnnnnnnnnnnnnnnnnnnnnnnnnnnnnnnnnnnnnnnnnnnnnnnnnnnnnnnnnnnnnnnnnnnnnnnnnnnnnnnnnnnnnnnnnnnnnnnnnnnnnnnnnnnnnnnnnnnnnnnnnnnnnnnnnnnnnnnnnnnnnnnnnnnnnnnnnnnnnnnnnnnnnnnnnnnnnnnnnnnnnnnnnnnnnnnnnnnnnnnnnnnnnnnnnnnnnnnnnnnnnnnnnnnnnnnnnnnnnnnnnnnnnnnnnnnnnnnnnnnnnnnnnnnnnnnnnnnnnnnnnnnnnnnnnnnnnnnnnnnnnnnnnnnnnnnnnnnnnnnnnnnnnnnnnnnnnnnnnnnnnnnnnnnnnnnnnnnnnnnnnnnnnnnnnnnnnnnnnnnnnnnnnnnnnnnnnnnnnnnnnnnnnnnnnnnnnnnnnnnnnnnnnnnnnnnnnnnnnnnnnnnnnnnnnnnnnnnnnnnnnnnnnnnnnnnnnnnnnnnnnnnnnnnnnnnnnnnnnnnnnnnnnnnnnnnnnnnnnnnnnnnnnnnnnnnnnnnnnnnnnnnnnnnnnnnnnnnnnnnnnnnnnnnnnnnnnnnnnnnnnnnnnnnnnnnnnnnnnnnnnnnnnnnnnnnnnnnnnnnnnnnnnnnnnnnnnnnnnnnnnnnnnnnnnnnnnnnnnnnnnnnnnnnnnnnnnnnnnnnnnnnnnnnnnnnnnnnnnnnnnnnnnnnnnnnnnnnnnnnnnnnnnnnnnnnnnnnnnnnnnnnnnnnnnnnnnnnnnnnnnnnnnnnnnnnnnnnnnnnnnnnnnnnnnnnnnnnnnnnnnnnnnnnnnnnnnnnnnnnnnnnnnnnnnnnnnnnnnnnnnnnnnnnnnnnnnnnnnnnnnnnnnnnnnnnnnnnnnnnnnnnnnnnnnnnnnnnnnnnnnnnnnnnnnnnnnnnnnnnnnnnnnnnnnnnnnnnnnnnnnnnnnnnnnnnnnnnnnnnnnnnnnnnnnnnnnnnnnnnnnnnnnnnnnnnnnnnnnnnnnnnnnnnnnnnnnnnnnnnnnnnnnnnnnnnnnnnnnnnnnnnnnnnnnnnnnnnnnnnnnnnnnnnnnnnnnnnnnnnnnnnnnnnnnnnnnnnnnnnnnnnnnnnnnnnnnnnnnnnnnnnnnnnnnnnnnnnnnnnnnnnnnnnnnnnnnnnnnnnnnnnnnnnnnnnnnnnnnnnnnnnnnnnnnnnnnnnnnnnnnnnnnnnnnnnnnnnnnnnnnnnnnnnnnnnnnnnnnnnnnnnnnnnnnnnnnnnnnnnnnnnnnnnnnnnnnnnnnnnnnnnnnnnnnnnnnnnnnnnnnnnnnnnnnnnnnnnnnnnnnnnnnnnnnnnnnnnnnnnnnnnnnnnnnnnnnnnnnnnnnnnnnnnnnnnnnnnnnnnnnnnnnnnnnnnnnnnnnnnnnnnnnnnnnnnnnnnnnnnnnnnnnnnnnnnnnnnnnnnnnnnnnnnnnnnnnnnnnnnnnnnnnnnnnnnnnnnnnnnnnnnnnnnnnnnnnnnnnnnnnnnnnnnnnnnnnnnnnnnnnnnnnnnnnnnnnnnnnnnnnnnnnnnnnnnnnnnnnnnnnnnnnnnnnnnnnnnnnnnnnnnnnnnnnnnnnnnnnnnnnnnnnnnnnnnnnnnnnnnnnnnnnnnnnnnnnnnnnnnnnnnnnnnnnnnnnnnnnnnnnnnnnnnnnnnnnnnnnnnnnnnnnnnnnnnnnnnnnnnnnnnnnnnnnnnnnnnnnnnnnnnnnnnnnnnnnnnnnnnnnnnnnnnnnnnnnnnnnnnnnnnnnnnnnnnnnnnnnnnnnnnnnnnnnnnnnnnnnnnnnnnnnnnnnnnnnnnnnnnnnnnnnnnnnnnnnnnnnnnnnnnnnnnnnnnnnnnnnnnnnnnnnnnnnnnnnnnnnnnnnnnnnnnnnnnnnnnnnnnnnnnnnnnnnnnnnnnnnnnnnnnnnnnnnnnnnnnnnnnnnnnnnnnnnnnnnnnnnnnnnnnnnnnnnnnnnnnnnnnnnnnnnnnnnnnnnnnnnnnnnnnnnnnnnnnnnnnnnnnnnnnnnnnnnnnnnnnnnnnnnnnnnnnnnnnnnnnnnnnnnnnnnnnnnnnnnnnnnnnnnnnnnnnnnnnnnnnnnnnnnnnnnnnnnnnnnnnnnnnnnnnnnnnnnnnnnnnnnnnnnnnnnnnnnnnnnnnnnnnnnnnnnnnnnnnnnnnnnnnnnnnnnnnnnnnnnnnnnnnnnnnnnnnnnnnnnnnnnnnnnnnnnnnnnnnnnnnnnnnnnaactgtagtgtgtatgggcgatagaattttattcacccataaagaaaagtgaagcttgcaggataaatgggttggtctggaagttattatcagaagcagaggagctcagactgagaaagggaagcaccacatcgtctctgtcatgttctcatcctcacagttaatgttcagatttgtctgtgtgtggctgggacagtggggatgggccataaagccagagcaggaaccacaagagggggatgaagaacttgaaaggaagggaggcaggcaatgaaacacaagtaacatgaatgttggggcagccaagggtgaaaggttacaggaggatcaacaaattacatttgaaaatgtgatagtgaggccctgtgagtttgtatgctaataccaaagtaataaaaatgcactggcatcctttagaattgtgcatttcatatactcaacagaaagctctttggtgagaacacaatatgttactgcacaaaactgcacatcacagagtaagaagctgccatgacacagaggctcccatgggacagggatgagaaactgtcatgacacaggctcccatgggacagggatgagaagctgtcatgacacagaggctcccatgggacacggatgagaagctgtcatgacacagaggctcccataggacacaggtgagaagctgtcatgacacagaggctcccatgggacacaggtgagaagctgtcatgccttgccagagctgtttaaggcactaaatcagtttacaacagacttgaaacaaaatagacacattctcatctactactggaggcatgacgctccaagcccagatgtcagaacctggttctccttgcagacaccagagtacactggagccctggtttctctctctggtgacagcttctaatccttgccatgtgtcttctcccatctccagtctttgatagccccactatgttatctctatgtcttttttttttttagatattttcttcatttacatttcaaatgctatcccaaaagtcccctataccctcccttctccctcccctccccactcnnnnnnnnnnnnnnnnnnnntcactgtaaaccctgtctgagcaggttctggccctgttgttatttctgctttttcagtatcttctgagtttagcttgggagtgaaagcaaaacctccttcatttgtactgggagggaggaacgtattgcttcctccattcccagatccagctgggaggcagcagtgattctgagaaagggacaacagggaaggatcttccttcctccattttcttgagagcaaaaatctgcttaaaatgtgccaggcagttggtatagtttacagtgatcagatttccatgatcatgtatacagtataaaacccatgaagatggagaaggtttcaaaggaaaaaaaatatattcacagtaagtttcattcaattaaatggtgctttaataaaatgtcatgggttccattttaggtactaagtcatgagaatccctaaccaaatatgcaccccagcacacgctggtcttggacggaccaactactttaccagttggaaatgcagaagtgagtgggcagggctcacctagcttaagggggctgtacgctgctgcaggttgtgcttagcaccacatggtgggtgtcagtcagattaaaagcctttgtttcattgggaacagaagggagttttacgcttttgctgtatagctgctgtcatttccaggttgctaaaggaagtgtttcttttcatgacatattcaataagctgaatttcctttaaatgcttttggtgtgttttgagggatccttttgtgtatgtttctgaaatttactgaatctctgtggagggacgaagattgcgttgtttgatggctgcctctgccaggttttttggcaccttgacaggcttttgcatttgggtaatgcaacataaagaacccctgtgtatttatagcaaaatagaccctgtgccaaggcccccagtcataactgaagctcttatctgagaagccatgcatgctgtggttggaggagaggtttgggtatcacacacacctggtgttaagactgcctgctcttccacttgggcaagtcataacctttcaaagtccaattgctacacatacacagttgccaggagaataaaatcatggcttacgggcaggctcacaagacagaggtaccttaggaagcagtgtcctgctcctcacacatgcatgtcagtaagccatgtagcttctcagacagtctggaaatcagtgtccaagggatcagttccttaaaaccccaagtgacagcgtccagattatcaagccagagacactctgggaagcagtagttagctctccgtctctgtaaactctaaatcgagggtcttattttctggttgtgctgaagttgccactggcagagctaggactgctggaacctggcctctccctttagatttcctgagcctctctctcctcaggaggcatgctcctgacagcacaggaagcccctgccaactccatgtctacttcaggacgctgtttcctggccaagcactgctactgagcctgcgaagttgagcaggatcgtgtgctgaggtgtgtgcatacactacagtgtgtattgtccctttagtaagaacagaagtgaatgcttacattccctgtgggatctgtggtagtttgagatgagaaggcagagctgcttacataaaagaacttacttaagacggttcaagaacagagaagttcttaccgtaagacatcttaaaacacagcaacagtccttcagttgtggctcgtgcattttagactccgtaccacttttcatttactctcgatgagcatcagtagtccatctggaacatgggaaagttacacgacgtctttttgtggtgacttctgagatgcattggagacgtactctgagctggcggtcatcatggagtgaatgttctgatgaagaggccagacccgcaagctctcaagttcaaggttaaggcaactgacattgcctcaggtcaaaccactgcccagactgttgagtccttcaagtctgatttattctaaacatttattttatgtgacactaatttccctgaagttgatccaaaacgtctctgtcaacatggttataataatgccacagatgtgttcccagagagggactctgcgtctgacctttagctttttatacagtgaggactctcacatcagacttatttatctaaaaatagaaaagtccttttaatagagaaactacttaaagcaggcatgtgcataacagtgtaattgcagggagccctggtaaagccaccagacaggccactgtgactgttcttcagctgttctgtgtggacacacaacgtgaagaaacagggcagcacagggaaagcggcagtgcccattcggaaatgtccaagcacctcagtgtaagaacttgacggatggctcagagaaagtccagggtcgtgtgtgtgtgtgtgtgtgtgtgtgtgtgtgtgtgtgtgtgcgtgcgtgcgtgcatactgcatctggaagttggtagtggttttaagtcaggacggggtattgtattatcatccagagctttcccatgtcctctgggcatagagcaggtacggtaggagtgagcatctacagaacctatcttatcagaaacaaacatggaagactctttgttgatccacaacagccagattccaatgcattgaaatatccctttaagaactggggttttgcctttttaatacagaggactatcaagaatgcaagcctagactcttaactgcacactgtgatgttggaaattcagactgagcagttcagtcgaaccattaaagctccaaaactgtgcaagcactggagcaatcaaccactgtcctccatgtgtttgcaatttgtttgattagggtctagacaaacttttagaagaaataatatggtgggatatatttcaaattttgttttatatatccatgattataaagtgtaaaaagtcaggggactattacctgtatcctagtcattcagggacttctgacgccggttcatttttagtcagtgtcgttgacacaagctaggcatttgggaagggggactctcagctgagaaatttttctcaccagactggcctgtgggcaagcatgtggggcattttcttgtcttatgattggtgaaggacccagcccactaggtaccatgacctatgcaggtgacctaggatggtaaaccatgaggctaagcaaaccatgaggaacaagccagtaagcaggtctccctgtggcctctgctttagttcctgcttccaggttcctgccctgacttttcctgatgatggactattacctgtaattaaaatatgaaattaacccttttcatccctaagtgacctttgttcctggtaagcaccatagcaatagaaaccctgactaagctcctgctccacatgattggtgggaggttnnnnnnnnnnnnnnnnnnnncctgtcaagttctgacactacaagcatgtgataccacacctagctctctttgtagactcctaaattattatcagaaattatgttctaatgattgcttgttcaacccctaagttaaagtttccagctcaacaaaaactccagtcttgtccatttaacatgttgagcttgttcccccattcttgttcatgatctaaaagctgagtttttaaggctggtgaggtggttcagattctacagtcacctgctgctctgccatgagcaccatcatcgggtggctcacagatgcttttaactacacacacatgcacacgtacacatacacaaacaaacactcaaacagacctatgattaaaatcttttttaaagttaaagtaaatcagcagcagtttaaggacatttggaagtctgaagtccagatgaatacaagggccaagtagggtctgacagcttggagccactggggctcggtaactctctttggccagggtgcttgggtataggtactctatctggtaagggtgcttgggtctgggtgctctctctggccagggcacttgagtctagatagtctctctggccagggtgcttgagtctgggtgttctctctggccagggcacttgtgtctaggtactctctctggccaggtcacttgggtctaggtactctttgtagacagggtccttgggactttatacccttgttgtttgtgcccactgtattcataacatctaactacctaattcatgcaacactgccagctcattctccagcaggtacatctttgaagtggggtgatgaaaaacacaagaacataaatagcaaagaacagatacctgtcccctataaggttctatcttagagctccatcccagtgactttactttctacctactaaccccagaaaccattttggggtttgaaggtgtgtgcactgccccccagatttccagtgtaggtgaagaggtggcaagcacgcatcactgtaaaccctgtctgagcaggttctggccctgttgttatttctgctttttcagtatcttctgagtttagcttggagtgaaagcaaaacctccttcatttgtactgggagggaggaacgtattgcttcctccattcccagatccagctgggaggcagcagtgattctgagaaagggacaacagggaaggatcttccttcctccattttcttgagagcaaaaatctgcttaaaatgtgccaggcagttggtatagtttacagtgatcagatttccatgatcatgtatacagtataaaacccatgaagatggagaaggtttcaaaggaaaaaaaatatattcacagtaagtttcattcaattaaatggtgctttaataaaatgtcatgggttccattttaggtactaagtcatgagaatccctaaccaaatatgcaccccagcacacgctggtcttggacggaccaactactttaccagttggaaatgcagaagtgagtgggcagggctcacctagcttaaggggggctgtacgctgctgcaggttgtgcttagcaccacatgggnnnnnnnnnnnnnnnnnnnntattttctatttcgagtcagaaacccatcccatggaaagtagctcattccttccccgctatggtcagactctgcttcaccaacctctgcctgtctatcatgcctccagccgtatcttagcctctcatggatggggctaaggatttgctcagaagcctctaacaggactttacattcttcagcacttttcttcacatggggtaatgccagactcactttttatcatgcttcccttgggcacttagaaaaagaggagcctaccatgcagagcctcgctgggtctccttgaagtgtatccagacatacaagttggtatttaaaataaggttttatttggtttgcttgtagcaagttaagaaaaccgaattccaggcattgatctaattttcacaagtttcttgcagaatggaagaaatggagaaaggcgggaaacacaatagacattatgaccatggatgtcaaagacttggccactaggaattgggtacagggttgagatgtagcagtgacaggtcaatactattcatgtgttgatgaagacctgtgcttgccattctttgccttagagagcccgtgagtgagtcaggtactacttttcaatatactgcctccagaaattatcatctcatttccttattttccatagaaaagaaataacttcactgctaaattataaaaagaataaaacattctagctatcccatataaaagacacacaatccaggtattttatttataagccataagcctagattgggtgggcctggaactattctatttctcagccgtaatgtctcttgttcctcctgtccatgtgctcatggtctatctcctctcatggtggccccctccacctccgtgtcatttcttcctctctctacctgaaactcccttactctgtctatcctcaagtcctgcctttctccatccattgcccaatcataggctctagccttttattgaccagttaattggggagcaagatttacatagcatcactaggtgcaagtgaggatctacttacgtgcagccagtatttagcattagattgcaagcagcatcagaccaaccttcgacattaagacactctataatgtcttaatctgtctggttcattttggtgttattttttctatcatgtgtatctccacaaccaccattcattttcttgaaaaagaaaaatatggccaaaaattaacaacannnnnnnnnnnnnnnnnnnncataaagccagagcaggaaccaccaagagggggatgaagaacttgaaaggaagggaggcaggcaatgaaacacaagtaacatgaaatgttggggcagccaagggtgaaaggttacaggaggatcaacaaattacatttgaaaatgcgatagtgaggccctgtgagtttgtatgctaataccaaagtaataaaaatgcactggcatcctttagaattgtgcatttcatatactcaacagaaagctctttggtgagaacagaatatgttactgcacaaaactgcacatcacagagtaagaagctgccatgacacagaggctcccataggacacaggtgagaagctgtcatgacacagaggctcccatgggacagggatgagaaactgtcatgacacagaggctcccatgggacagggatgagaaactgtcatgacacaggctcccataggacacaggtgagaagctgtcatgacacagaggctccatgggacacggatgagaagctgtcatgacacagaggctccatgggacacggatgagaagctgccatgacacagaggctcccatgggacacaggtgagaagctgtcatgccttgccagagctgtttaaggcactaaatcagtttataacagacttgaaacaaaatagacacattctcatccactactggaggcatgaggctccaagcccagatgtcagaacctggttctccttgcggacaccagagtacactggagccctggtttctgtctctggtgacagcttctaatccttgccatgtgtcttctcccatctccagtctttgatagccccactatgttatctcggtgtctttttttttttttagatattttcttcatttacatttcaaatgctatcccaaaagtcccctataccctcccttctccctcccctccccactcactctcacttcttggccctggctttcccccgtactgaggcatgtaaagtttgcaataccaaggggcctctcttcccaatgatggccaactaggccatcttctgctacatatgcagctagaaacacgagttctgggggtactgattagttcatattattgttctatctatagggttgctatactcctcagatgctaatacttgacttttattgaccccttcagctcttgggtactttctctagctcctacattgggggccctgtgttccatccaatagatgactatgagcatccacttctgtatttgccaggcactggcaaagcctcacaggagacagctatatcagggtcctttcagcaaaatcttgcaggcgtatgcaatagtgtctgcgtttggtgactaataaggacacatgctctactatgttcatagtagccttatttataatagccagaagctggaaagaacccagatgtccctcaacagaggaatggatacagaaaatgtggtacatttacacaatggagtactactcagctattaaaaacaatgaatttatgaaattctcggtgtctcttacagaggcattggtggttgcgtttcgggcccacagttatcctgtatcaactcatcttatgtaaagaccttcttcctaaacaaggacacagtcacagctatggaggcttggacttgtgggtgtagtttaagcactgtgagtttcttactcctcagatgctaatacttgacttttattgacacctaagaagggacatcggttttgttttaaatggagctcctggttgagcttcaggtttttctggaaggctttgttttcttgttttgttgtttttggtttttgaggcagagtcttccagcctcagatgcttcagactcattacagagatgaagccatcattgagtgcctgacgcccctgcttcacccttcccagtgctgggatggcagcatgtgccttagtgcattgtgcattttttggttttcaggctaacacagagtcaatcaaatacccatgaagctacctccaaaactacctccacctgaaaaggaaaggaagggttttctggctgtgttgttatctgagaataatatacttctgagttttgctgttttgtgctttctgagaaagttaagactctatctggtttcttctaaatgttaccattgttacacgtgtctactgattgaccctcttttaagatgaccatatgcgatggattactttattgtaagactgtagtaagatagtgtgactcagtgtggagacaatcgaggccagaaaagcaatggacactggagaactgttaaggcagttgtctacacatgtgcagagaggtcacaggtcaccttgcagatagtagtcagtggcctaagcagttgctacaagctagactctgtgtgtctttgttagggtctctgttgctgtggataaaacaatatatagtgagggcaggttggggaggaaaagatttatttcagattagagcttctccataggccattgctgagggaggtgaagaacctggaacaggaaccaatgtagaggtcgtagaggaatgctgcttactggcttcctcttcatggcttactcagcctgctctcttccagagcccaggtctgtctgctcacaggtagcaccacccacagtgatctgggtcctcccatatcaatcagtcaaggaaacccaccatatgtgagcctagaatatctaataaatgtgtcaaagtgcaaatatacagtgggaactatgtagttgctttaaaaagcagagtagtgacacagtccctcatgcttggcactggtgacctggtacactcactctggaaagcagttttgtcacacctgttaaaacttaaacagcttatataccatagaagttctacatgctaagtctgtccaggtggttatgaacatcttctcatctgaatagtatacacttggattttaatttttcttattgcttcagagacaacaaaatagaaacagaggggggagaagacagaggggggggaaggagagagagagagaggagagagagagaagaaggaggaagaggaggaggaagaggaggaggaggaggaggaggggagagagaaagagagagagagagagaagaaggaggaggaggggaggggaggggaaagggagggggagagggagaggagagggagaggagaggagagagaatatgccttgtacatcctaaaacagctttgtaacaccccatcttgtggatgaggctggacctcctgtcgctcttggaatttactgtacatcagccattcccagtaggtgctgtggtcctgactgggcctctgcacagatcagttcagtcaccctcataaacctgacaagtgcccagcatgcccagacctaattctagaagctaagagcagtcatcctcaaggtacaagggtctgctcacctgggatcaagggtgtcctgtgtgtaatcctgtgagtacaacaagtgtttgtttttatatctacccagaggcatcacatgacaaaggaagaagaagaaaggttgagggaggaaggccagcaggacctctgctgtacattcatggaaatctcagaattgaagagagtcttgtccagcccagttctgttacacaactgttttgttagatttcatgctttgtcatttgactcttttgaaagttttgtattctggttaatgatcctgaattccagtgggttattgaagtatagtttaatagagaattctcacttggatgcagaggtgcttataggtaggatgtataaaataaaactccacagctctctcttgaagactcccatttcgggcctgggcttctttctcactgttagcaaattcctttatgcaccattagtaacatcatcttcatcatgcagaacgctctcagcagataacttagagtaggtgtggtctttgccgaacctcatttttgtcactgtaaccctaacttaaaatttctcagcagggggaatagattgcacaggtttcaacattatcgaatatttcttaaagatgggttttattggtacttacgttagtgtctgtgtggtagaggcaagagtgtgtggatacattccgaatccagggagagcatcaggtccccagaagaggagttaaagtaggtgtcggtctatatgtgggtactggggaccaaactgtagtcctctgcaaaggcaacannnnnnnnnnnnnnnnnnnncatcttcatcatgcagaacgctctcagcagataacttagagtaggtgtggtctttgccgaacctcatttttgtcactgtaaccctaacttaaaatttctcagcagggggaatagattgcacaggtttcaacattatcgaatatttcttaaagatgggttttattgttacttacgttagtgtctgtgtggtagaggcaagagtgtgtggatacattccgaatccagggagagcatcaggtccccagaagaggagttaaagtaggtgtcggtctatatgtgggtactggggaccaaactgtagtcctctgcaaaggcaacactgcccttaaccctaatggcaagctgcccctcccctctccagccccctctgcccctccagccccctccccgctccagccacctccagcctcctgccccagttattttacgtggtcctctctacccccagcatggtgctgaattgaagtgtgatggcattggctaatctttgtgtcctgtgcatctttggtattcgtaggatctttgaggatgtttgttctagtcttttgtactcatattttctaaaagtcattctgattttctacatacaacttctccagtaactgcagatcacagtcagccgtgagagtacaatgtcgccctgtaatcctggataacaggtgaacagccttgatgatacaggcagatggttggaaatcccactgggcttcaagtcctttctaccagaaagctcctagagtttttccctggtgtccgactggaatcctcccaactgatgtttctctctctctctctctcctttctaaacaatcaacagctcgatcaagtcacccgccagcgtagcctgtccagcctggagctgttcctctcctgcgcccagaagcagctgagtgctctaatagctacagagcctgttgacgttgagtagagacacagcagatccatcggtcgtcaagcctgcccactctgaagctgtttttctcctgcgcccagaagcagcgagtgctctaatggccgtagagcctggtggcattgaataaagggaacgtgatgggctgccttgccctggccattgcgtcagtcactagacttctaagttagatactatgacttagacaagtgctcttgttttctgtttaaacctggaaagtgctttttcagttccagaatgagccacagcagtttctacagacccatcagcggatctaactctctgctattttatcatgaggagtgatggaagagtgcctatgacccaaagtcatgggaaatctgtgtgttatccagagtgcttcaggtaagcctatacagcttctggtaaccggatggcactgtatttggtaaaggattaccttgtgaccacctcaaggtgatgtgtagggagcaaccactgtgtagccatgcatttacttgattctaagtagagtgggcagacacattggcatggccattgttctgactaacctgaccacttccccacacgtgaccccgtatgtttccatagatttaccaaaagtgaacaccactagctggccaggtttagagcagctgctctgggtgaactggaatgtgtggcccaggcttgcttcctgccattcttcaaaggctcgagatcatgtttcataatctaatatctggtaaaaatcataacagaaatctacacatctatttaatcaaataccagacataagggataaatcgggacgttcataattcatgagcagtgagctccagcatgaaaccatgagtagtttggacccacgggatgttgtgctcacgtcctgcagtgcttctgcttcctgggctttgtatttttctgggatttctcagtacaataaaaggaactccaaaaagttgcttgattgtcatgtttttgttttttaaaggttggggcctcactgtatagtcctgcttcaaaatcagagttatccacatgcctttgtctcctgtgtgctgggaaaggcatgttccaccatgctaggctacagtttattaaatctttaaaaaatactgtttctttaaaaaaaatgtttctttctcaaaccataaatgattgtgttttgtgaacactcccccttaaataatgacagcatttaccaagaatcttacaactccttagttatcatagaaactcaagtagaattcggagtaagcaagccattagcctgacttgctgctacgtgggaaaagtgaggagagttttgaattcagacagaagccagtaggtctgggcccggtatttaagttcacttgacattttatttccaaattaaatgtcggggagccatcacacatcactcagattggccttaggttagtgtggggtataggtcactgttgctgaggtccagagagagcagagatgccaggagagtatctagtcttgagtctgccttacccaactaccacaagaggctgtgtctttttctgcttggggttccagctttgttgtctatacaaagtaggtgttctcttaggatgagttagatctgtcagcatatgaagactgaggaacactgacctttattgctatgtattttccgtggggtgtccttaaagatgcctggaagtccatttgtgaagtctgacgtgtgtatagcaattatttaagctcaactagctaatggtgttggtgttgggtggtacttaaggtatatttccaactaaatgcattgtggtttttgtttggttatcaaaagagcctagaccacctcaggtggcaggcaccaggaaaatgagataatcaggcacttcccactgcaaaggtaagcctccatcctagagatgtgaaccccacagagtctcatgaaagactggaagcaagccgatcaccttggcctttttgacaggtacaactactttcaaattacaaatctgacactaccattcttgggtggaaaagacccccaaccccatgtgagtggaactgcctagtatttctcatgttagtaaccctggataggaagtgacatgttggagtttattaaatagactgagtttctcatgagagtttctcatgagagtttcagccttgggccttttaacactggcctctgcttcttcagactggtgtgacccagtgctccctccataggggcagcacctcaggtgcacatcctggcttatcttagtatcctaagccagccacattctaggtggggtctttagacacacagcctagcctactaggactcagtttcctcatgtatgacagagaaatgatttgtagactataaaacactgctggtactctgtgtgatgaggcatgttgatgtgaccatcactgcacagtgataaacccagggtggtggccacaggcaaacactcaagctattatctttaattcttcaccttgattgagggatctgcagctgaagacctgacatttactggaactccagtgaaaagttaactggtaagtcactgagtgtgccctaaaaaggtttctcttctgaagtcagagcttatttaaacccaatgttctgagtcttgaactctatggtataaccaagatcttcttggaatattcaggtccactttccccttaagttagccggagcccatgtgaattacctgcaccaaagaaacagcaaagaaggctgtacaaaagagccaagcacacaatccctggatacccagtgagtgccagtttgtctccacatactagtccacactaaaatgggagcactcagattttttgtaaggaatgttgcatatataactgaaccagtctcttgtctgacaaagctgaaaaagtcacagacccctgagactgagctgacagtgacctgcttagacattttttgtcatttagaatcagtgttgatttaaagtcctgtcccttagctaagtgctgactcatgccagagttcaaggagccaacttagcacttttcctggggttggttatactgcagagtcaggtatccataattataactgcttttgaatgttttaatatacttttacaattagactggattaagttagaaaatcctgtatttaaacagtaaagacaaaagcactgtttgctggaaaaaagagaattttgtataataaattccaaggtaggaagcatatatatatatatatatatatatacacacatacacacacctgagatgaaaagttgggtcaaagctctcaatgccagcaaacagctctgctatgtcacaaagattgttgacaacacagagaaagccagtgaaccaagcaactgtaggccacttatcataaactacaggcatcacaggcctcttagcaacaacaccagcaccacatgccctttaccttagtaacagcaccagcatcatatgcctcttagcaacaacaccagcatcacagccctttaccttagcaacaacaccagcatcacagccctttaccttagtaacagcaccagcatcataggccctttacctcaggcagtaaggagaagcagctaagactaccagacattgaaagccagcaaactaaatctatatttctttttaaacagatgttttacacctttggccccttacaaaagcctatttgaccgtcagtctttgatttttttttttatttttatttatttatttatttttgtgcacaggagggaagttactcttttctagggtcatttctgtcggctttctcccagttagatggttccaccccagtagcctacctgccatcagtgccactgagtgtgtcacatagatcatcataataattaaatatcattgttactctatttcagagtttgtgttcttatgtcatcttcccccgaagagaacctacatggggtgtgtgtgtgtgcacatgtatgtatgcatgtgtgtgcaggttgcatagaggcagtggaggatgcacatgtccacctctatcactttcctcaatcccttgaaacgatcactctctgggcctacagctagactaccagccagcaagccccaccatcatcccaccccacaccccagcactggagctatgagtggatttgaggatattccttgcttttgcatgggtgtgaagggttcaaaatcatcctcaggcctgcacaccaagtgttcttatgtactgacctgtctccccatcctcaggcctgcacaccaagtgttcttatgtactgatctgtctccccagtccctgtatctgtttttgtatcacatcagtaaagcattttacagttactgcttctaatgacctccatatatagttgacttaataaccaaatcagcaagtaaaacacataaaaattaatgagctaatagattctgactactgactgataggacttagctaaaatcactatatctctaaatcactaaatgaggtcccataagaacctggagtcacccatatacaatactacctagcctgtgataaattaccagagtctgaaaactctataaagcaaatccagcctgtgataaattaccagcctgagaactctaaaacaaatttttcatgtcctactattgttcagtgagttaatttccttgctagaagtatactactcacattcacaaggtagtccaggatgaggagcagggaagaattatgtggcaacatctatatgaaataaccctgggttgcaggaccctataggagccaggaaacatcttcatttgagggagtaggctctgtcctccagtgggcaaggaggccaaggggcagtagaaagaggtcttctctaacagggtaagatgttacagggttcaggaatagtgggcttgcataagaagggaggcatcaggtcagattggatcaaaaggtgtacaagtacttctaaaaacgggctgaacccagacaagagcctttttaaaatctctgatcccaacatgtgacacagactagcccgtatggggaaatacacagaaatcaagaagcactcttattcagaaggtaggaaaatttgactcagtgctggcgaacattcaattgtcggaagtctggaagctgacttagaaaaaaataatacagccacagaatgtacaaatcgctgactttaacacaactcactagggcaaattctagaaaattctatgtggcaagatatgtatgtgatgaatgttgaatctttgcccatttcattgaggtattgttttctagaaatgatagtagctttggtcatggatacacactgacctttataagacattttccctgaagtgtttttggttgatgcctatttctcataaatgccagaaatataaatgttgaaagtccataaaaatgttgactactttgatattaaactagtaaattgatggttattagtgcattatgaattcatcttgttgctgctacaaaatgcctgatgcaagcaacttaagaagagaagaattcattttgattcccagttccaggttacagcttggcatggaatcacagctgtggcatcatggtggaggaatcacatctgtaggggtggtgtggggctggacagggcatgtccacagacatgcagtgagagaagtgaattctagtgctcagattacttctgctttagtctggacacctctgcccctgcccatgacaatggtgctgcccatggttactgagtaccttcccaggccaattaacctagatgatccctcaccagcaagccaagaggcttgtctcctaagagagtggatcttgtcaagttgataggatgaaatctcacagtgagttagcccttaaaactcattatatgtggtaatacttttagacaaacaaggtctagtcatttagaaagctaaaatttattatcaacatatctttttcttattcttccctcttttttctcattaagcagaggaaagatacactgtaagctaattctgacatatgctaccagctatagaaagtgagaaaactcggttgatatcaagttttgagattctaggaaattgtctacctgattctaagcactctggaacaatagcctatcctttaataatagttaagatcacttttaaataaatgcaattcttctagtgtgctcaagggttctacctgtgtgaaccctgtgccttgatgccagttccccacaggaagaggatttggtctcagaaatgtggtatatgcctgtttgcaagtatattctctgttgtatgtaaaatatagtccacaaagaagcccaagaattccttatcacctataatgcagtgttgtggtggactctaaccccaagtttaagggctggtaacctcatccatttctttggtactttttaaatggagtgtgtgtgtgtgtgtgtcacagaagctagaggacatctctcccttgactacttccatgggtggtgaaagcccggctcctaccatgagcttgaaaccactgagccgtctctccagcccccttccccccactgcttagcctctccatactggaatcagaagatgctggtggccaccaaatccatacctatttgccctttcttccttagttctgaatcttcatttagctgcctatgtattatattgactaatgctcattgtttcacaaccagaaatcttcacccctggagttttagaactgaagtcctgcctcctgaagccctcagcaggcaaggctctgccattcatcccaatatgccaatggaagagaggagaaagtgaaaagcaaacaaagaagatttaatatattttagaagggctgagtaaagataaccccaagttcacccttgagcattgacatgagctttaggcttaaagagaaagaacttgagactgaggacaggggtgagaaatcaaactgcagaaggccttggctcagtactgattgtgtaaagggagttgatggactgtggactgtcactgtcttctcagcatgatgggtgggcgggaggggacagtttggttcttgcagtgggacctgtttctggctacagcctcctcaacaaagatggaagttcctatccaggggacagactgtcctgtgagaatggtcttctagaatccagggtgacagcaggtttagcactgtctttgtgtgttttagccttaaatgggaatgagctatttggcagaagctattcttagtgactaaaaaatgtgtaaaactaacaggactctggccccaaaaggaggtgccacagaaaggtggcagagaagccagcttcaccctgcttttatttctgtgtggacccaagtaagatgtcaccgctcttcagcaaaagcagggcccatgtgcctgtggtatgcctctgaggacagaaagccacactcaacaacacacacacacacaagtgcactcacacacttggttgcatcacttcatagtgtagcctgagacatctacttccccagccatctccttgcccagtgtctttatgatctcttacttagggatttgaagtagaatgcagatgagctctgttccacacttgcccctcagaatctcctaagtgtcaggattgactgagacctaagctaaagtctccagaaagatgtgtttacaacttcatcttggattgttggatcatgcccaatgaagagtatcaggtattggtgacaccttgtctctggggtgatagcacgttggccaaccatgaatggactcctgggctaagttggcagatgaccagcaagagtcctacagacctccattcactctgtgtccagagtgcatcctgtccagttctaattggtgtggtttgatctgcctcctttttcttctctgaattcttctccaatgagagcttctctccctcaagacttcctgggatcagaattcaatgtcatgagtacaatgaaggttcattggtctctcatagatgacataatcacctcgaacaaagaaaaaaaaatggaactcctgcaggcccttccacagtgctctctccttgcgcttgaccaagtggtgacttgcagaatgttgtggactgttcagcagtggctatgtgagagctgaagtgtacaaatagggtcgtgttgggtcttttttcttctaaatttataaacacccacatgatgccatcatcccaggtgtataaatatggagctgctcttgcctagggaggctctgtccctgtaactttattgtttggttgtgtttctttctgctacccatttctattttgtttgagtcagagtcttgctgtatatctctggctagaaaaaggaggcttcaagttccctccagatgaacgctggggtgagcagcgtttctagttgagtctctaaaataaaagagaggctttctctgttcctcagaatcttctctctacagttaaaaggacacaataagtgcatccttggttgccttcacatggcttcgtgtgccctcaagttgaaattaataagcagaaagctatgtgttctggtgcacacacctgagataccagtgcttaggaagggtagaaactggaggatcagaatgttagagccaccttagctacatcatgaatttaaggttaacctgggctacctgagattctctctcaacactcatccacagagagagacagagacagagacagagacagagacagagacagagacagaggaagaggaagaggaagagaggagaggaagagagggaaggaggaagagaaggagggagggaaatttaacctcttactgaacacttaaaagtagattttgtaggaatggaaaataagtgtctaatgaattgtaagtattcaaaattgttcattccctgatgtctccgtttgtggatgggtagcatttaaaataaaagaagcagctgtgtgactatttcagcactgacagaatgttagcgtttggccaagtttgttttactgttgatttacctgtttgacagtcttctgtctgaacttacatgaagatcaccgaagagcagaagcccatcagtttctgagacctgctcattttatttgttactatctgttgaaccttttctgcatgagttcataatagcagtgctgtactgcaccacacatgcactcatctagaacaaatgctccaggactctgagatgctctcttcctggacactcatctgttagactggatgctgttagactgtgcgcctctggctgcagtggtctccacacctgagactgggtgtttccacctcacgggacatagctccatctttccctccctccttcctccttgcccagctgctggattcctgtctgccatgaagagtggtgacaaaatctaatctgaactagaccacagtcagacgaagtccgattgaggacttggacttgtgtcaaacccaaagcagaggggcagggtggaaattggctgtcttgtaaatagaaaaaccacccagtgtgtgaaccttgaaatcatgttaccgggggtgagtccatctgctgtgttcctcaattccatcatgtctactctgccagctgtttttgccgagtgtgatttgcagtgttattttactgaaggtttcttgacaatttgagtaccactttgaatgttatattaaatcctcttctggctcagccagttgcaaaattggacattctgtctacacatcaatccccaggtctagaggggaattgtaggctttgcctacccagcacatctcaaaagcactcattctgtctacacatcaaaccccaggtctacaggggggaatgcaggctttgcctacccagcacatcccaagggtactgccttggagatttctgcgcaggtggtacttcaggattccctgaatacatccaagcaagattaagtatgattagaaaccattttactcagaggctaatatgaagcttgggttcaattcctcacaaatccatatggcttttttttttcttgcttacgacatctagccagttccaattgccagaaccctcagcttaatcccactcctttgggaggaaactggagatgacaaatgatcttagcaatgggggtctaaattcttggtgtcaactttacgtgtcaggtgcaggtttggttgtttgcttgggctttgtgttttgttttgttttgtttccctttcttcttctttttataatccatgtgggatctagttttaagagagtccaaaagacacagcactgtaaagaaccctcagagaatcaagtcaattctcagcttgtgtgtgtgtgtgtgtgtgtgtgtgtgtgtgcatgcatgtgtatgtgtactatatgtgtgtacatatatatgtatgcctatcatgtgttcttgttatttgtgtgtatgtatgtgtttgtatctgtgttatgagcatatatgtatgtgtatgcatgcattgtgtatgcatgtttgcatgtgtgcactcatgtacatctatgtgcatgtgcctgcatgtgttcaggtgcatgtggtaactagaagtgaggtggagatggtggagagggcaacaaggaggaggcaagaaaagtgaagaagagataggaaaagaggaaaagaaaaatgaaagtggatactcatacatataatacaatgtaacatgcacacacataatgcagtgttacatgcacacacatataatacagtgttacacatgaaaatgggatgcacacacacataatacattgttatacacgaaagtgggatacacacacacacacataatacagtgttacacattgtcacacccaaggcctttaacatgccatatacaaatacacacttgaaaaggtgagaagagagaagggaccagatattgagattttcctctccctaaattcccaaacccagacaatgagctggtcttctgtataattttctctacccagctctgcctacactcgatcctggacagctgaggaaagcgtctgggctgacagtggttttgttttcttctttttgtagagtaagtggcagattgaaatgaactcacacaaagacctctgcctgagtgtgtagagagcacatcctttgtacatcatgtgtgagaaaatatcagatatcaaatattggag

SEQ ID NO: 1105 - DNA, 2963 bp, Mus musculus
aaacatttcttgagcatgtcatagtgccgggtgctttattcagttctcacattttggttgtttgtaagaggcaaaggctcttctcgtggtagattcgagttctggacagaagaaaaattcagatttggtaggtggttttatgggcctgtcactaagagattgagaacctttactaggaggtagatcttgagaaaggttaggaaaagcgttaagtcgaagccaatctatagcagagtcaattacctgagaatcactcaactaggaggttcttcttgtggcctagccagctgaatctctgttaggaggaatatctgttgaatagtttgttttggctcaggacaaaagataaagacatgatgtagtttttgaggatggtcaggccagtgtatatcaggtcaatccacttcacaggtcaggtctctcttcagatgaggctcagctggcctcctcttggggggtcatgtgatgcgcccgctgatgcctggagcgccgcgcgcaggcctgggcgggcctaggtagaaatcaacttccggtgaggatgtcctggacgccgggtggtgtgtgggctgcccgaacgtgggttcctgggccagcagtcaccgggaggggggtggttgcgtagccggtgtcccggagccagtgtctgagagccgggtgtgacgcgcaacagcgcggggagcactgcggtgggcgcaggtgcggcttaaagaatggatgatgacgactttggtggctttgaggctgcagagacctttgatggtgagcaaggaggaaaccaagctgtgtctcctgctgtcccctgggccacctttcctgcagtatccggagtgcgactctcaccagcttctccggagcttatcctggaccatgaccactcatctccatccactggccacctccctccagatgctgtcattacctcagcagatgatacgcatgcagatagcagcctcatgagtcagaccatctccaaggctcagattcagcagtcagcgcacacacatctgaacatccctctcttcccacttggtttaacggatgagccgagccatggagcacttgccctggaggatgagcctgaaggtcctggagtccacgtgtccaactctcagctccggcaaaaaatatcaagtctggagactaaactcaaagcttctgaagaagaaaagcagagaattaaaaaggatgtggagtcactgatggagaaacacagtgtcctggagaaaggcttcttgaaggaaaaggagcaggatgctgtatcctttcaagccagataccgtgagcttcaggaaaaacataaacaagaattggaagacatgaggaaggctgggcacgaggcgctgagcattatagtggatgagtacaaggcacttctgcagtcttcagttaagcagcagctagatgccatcgagaagcaatatgtgtctgcaatcgagaagcaagctcaccggtgtgaggagctcctgcatgctcagcatcagaggcttctagacgtgctggacactgagaaggaactgctaagagagaaaatccaggaagctttgactcagcagtcacaggagcagaaggaatcactggaaaagtgcctccaggaggaaatgcagaggaacaaagagacactggagtctgctgtgaagcttgagaaagaagcaatgaaagatgtcatcactaaagcagtggaagaagaaagggaaaatctggagaaagttcatgccgaagaaagggaactgtggaagacagaacatgcaagagatcaggagagggtggcagaggccatccaggccgctgtgcaggagcagcagaggatgagtcaggaagctgtcaaggccgcaatcgtagaggagcagaggagaagtgaaaaggccatggaggaagccgtaaagagaacaagggacgagctggtggagtacgtgagggagcagagaaggctcgatcaagtcacccgccagcgtagcctgtccagcctggagctgttcctctcctgcgcccagaagcagctgagtgctctaatagctacagagcctgttgacgttgagtagagacacagcagatccatcggtcgtcaagcctgcccactctgaagctgtttttctcctgcgcccagaagcagcgagtgctctaatggccgtagagcctggtggcattgaataaagggaacgtgatgggctgccttgccctggccattgcgtcagtcactagacttctaagttagatactatgacttagacaagtgctcttgttttctgtttaaacctggaaagtgctttttcagttccagaatgagccacagcagtttctacagacccatcagcggatctaactctctgctattttatcatgaggagtgatggaagagtgcctatgacccaaagtcatgggaaatctgtgtgttatccagagtgcttcaggtaagcctatacagcttctggtaaccggatggcactgtatttggtaaaggattaccttgtgaccacctcaaggtgatgtgtagggagcaaccactgtgtagccatgcatttacttgattctaagtagagtgggcagacacattggcatggccattgttctgactaacctgaccacttccccacacgtgaccccgtatgtttccatagatttaccaaaagtgaacaccactagctggccaggtttagagcagctgctctgggtgaactggaatgtgtggcccaggcttgcttcctgccattcttcaaaggctcgagatcatgtttcataatctaatatctggtaaaaatcataacagaaatctacacatctatttaatcaaataccagacataagggataaatcgggacgttcataattcatgagcagtgagctccagcatgaaaccatgagtagtttggacccacgggatgttgtgctcacgtcctgcagtgcttctgcttcctgggctttgtatttttctgggatttctcagtacaataaaaggaactccaaaa

SEQ ID NO: 1106 - protein, 438 aa, Mus musculus
MDDDDFGGFEAAETFDGEQGGNQAVSPAVPWATFPAVSGVRLSPDELILDHDHSSPSTGHLPPDAVITSADDTHADSSLMSQTISKAQIQQSAHTHLNIPLFPLGLTDEPSHGALEDEPEGPGVHVSNSQLRQKISSLETKLKASEEEKQRIKKDVESLMEKHSVLEKGFLKEKEQDAVSFQARYRELQEKHKQELEDMRKAGHEALSIIVDEYKALLQSSVKQQLDAIEKQYVSAIEKQAHRCEELLHAQHQRLLDVLDTEKELLREKIQEALTQQSQEQKESLEKCLQEEMQRNKETLESAVKLEKEAMKDVITKAVEEERENLEKVHAEERELWKTEHARDQERVAEAIQAAVQEQQRMSQEAVKAAIVEEQRRSEKAMEEAVKRTRDELVEYVREQRRLDQVTRQRSLSSLELFLSCAQKQLSALIATEPVDVE

SEQ ID NO: 1107 - DNA, 379724 bp, Homo sapiens
aactgcaggcttgatacgctctctgactttatgtccttataactatgtattcaaacttataaaaatgttatcaaagaaaaatttgactagtctttatttatattttaaattggaagccaaatattcttgagttgacaatataacaaatttacaggcagagttagtgcctaatagacataattttctttcagatgtttggataatttttttctcaaagttaggttaaagtttgacataagaacacaaaattcccttttatcattaggatcatataaaatccctaacctaaagaaagaggaaaaagcaggaggaccttccactgctcacatacaacactttacttgttcttgtcaagttaaaagagtgatcagactctcaagagagtgctgcttggggttcgactgtgttctttagaactccatttttcaaactttagagttttctcatgatgtgtaaattttgtggtgcaccaaaaattttgaaaaagtttagttcaaactcaatttatcttagtcgtagtagctcttgcctggctttctgcccagagtattgcttggtacatctgcaaaagtggtgcagtaactactaaggaagcaatacaatagttaaatacagatgtaaagcctagcttgctttttgattttttaatgcgtatcataaaaagtagcatttagttggagaaaatattaacaaaccatgcattcaacaaaggtctaatgtccagaatctataaggaacttaaatcaacaagcagaaaacaaataatcctgttaaaaagtgggcaaatgacatgaacagacacttctgaaaagaagatatacatgtggccaacaaacatatgaaaaaatgctcaacatcactaatcatcagagaaatgcaaatcaaacccaaaatgagatgccatctcacaccatttagaatagctattatttaaaagtcaaaaataacagatgttggcgaggctgcagagaaatgggaactcttatacactgttggcagaaatgtaacatagttcagcccctgttgaaagcagtttggagatttctcaaagaactaaaaatggaactaccattcaatccagaaatcccattactgggtatataccccaaagaaaatcattccaccaaaaagacaaaggcacttgtatgctcattgcagtactattcacaatagcaaagacatggaatcaacctaggtgcccatccatggtggactggataaagaaagtgtggtacataatcaccatggaatactatgctgctataaaaaagaatgaaataatattctttgcaacaactcggatggagctggaggtcattatcctaagtgaattaatacagaaacataaaactaaatactacatgttctcacttataagtgggagctaaacagtgggtacacacaaacataaagatggaaacaatagacactggagactacaataagagggaggaagtgggggaagggttgaaaaactatttactgggtactatgctcactacctgggtgatgaattcaatcatataccaaacctcagcaatgcacattatagtcttgtaacaaacctgcacatgtgcaccctgaatctagggtaaaggttgaattttttaaaagtaaaatttagcagccagaggtatgttatttaacaaatgattaaaaattatatgaatgatttaggtgtttaatccagaatacaaaaaatattccagcataaatttttgtttatagaaagtttaatttcacaaataaaagttatttgttcatttatgttttttaagtatgtaatgaagactaaaggaaatagagtggacacatgtactttctattgatagtcactacattttttagttatttatttggagataatagttgaaggcaacttatcatataaattaattttgttaatttgttgtaatgattacacagatcaaatcatggcttctcttctctttctgcttgggctttcttttctgtattaggctctgagatacttgaagcaatttaagggagtgattcttgccccgttatgagttcagttaaccaggcaagccaatatggtggccaatgacaattttccaaagagtgagaagttagggatcatgtgtctcctaggtaatggagatttcataaatgggttatgtacagcactgaatccaaaggagacctgattagagaaagggccagaaaagtgttatttaaaactttcacagtttactctttaattttgtatatacacagtgttacaaataaatatttgaaatgcttttctattggtttaatgtgggaagctgagtagtgcaggaatctgagagaactgcactcaggaacagtagctcatattcagcctcattctggcatgagcatggacacagaagaaagtagttatggctcatttccatttttataaaaaacaattattttctaacatttaataagaggttagaaatacagaatctttctaccagttaaaacatttgggattgcaagtaacagaaaccctaattcaaactagattaaacaatagaagggattgttcacataaatgaaaagtcccatggaggtgaaggaagctttagaattgatttgatcaaagtttcagctccatttctctgcattatatcaacttagttttactgtctgcatctgctttgtcctcagactggtttcctttacagtcacaaattagttgttaaaagcaggaggggttacaggcttcatcacttataggaagttcttcctgacaactatcgaacaattgtcctgaggtttgtacttgttggataatccctgaaataattcatatgattagggtaatgctatgattgggctaggacagggttgtccactcacaataactgtgtcaaggaggttggggtaacttttagcttagaccaatcaggactcacccttagaaaagggatggggtcaatctcattgaacacggctgaaagctacacaatggggtgagggtaaaatgcatgtttgagtaacaactaccaggtccactgtagtatactcttgtgctccccaaccattgtaattaacatgtatctttcttttccccactctctctctcactccacaatatgtgatatggcttggctctgtgtccctacccagatctcatctccaatagttatccccatgtgttgaggaagggacctgtgatccccatgtgttgagggaaggaagtgattggattatgggggtggttcccccatgctgttatcgtgatagtgagcgaattttcatgagatctaatggttttatacgtgtttgacagttcctccttcacaggctcatgctctctctctcacctgccgccatgtaagatgtgcctgcttctccttctgccatgattgtaagtttcctgaggcctccccagccgtgcaaacctgtgagtcaatttcctttataaattacccagtgtttggaagttctttatagcagtaagaaattggactaatacaatatgttaggtttacctggaattccttccttatggtctagcaactaacaacaaatgttaataaatgcaaaaagcaataaatgtaaaaagcaatgaaaaagaaatgcaaaaagcaatgaaaaaataaatgcaaaaagaaatgaaaaatgcaaaaagcaatgaaaaagaaaggtcaaaatcactgcaataaaaactcccaattaaagaggggacacaggctgggcacagtggctcactcctgtaatcccagcactttgggaggctgaggtaggcggatcaccagagcttgggagttcgagaccagcctgaccaatatggagacacactgtctctactaaaaatacaaaattagctgggtgtggtggcacatgcctgtaatcccagctactcgggaggctggggcaggagaattgcttaaatcgggaggtggaggttgcggtgagctgagatggcaccattgcactccagcctgggcaacaaaagcgaaactctgtctaaaaaaaaaaagggacacagtggtttctgatccctgtcatactctgtagacaggaataatgaggactgttggctggcagtggtatgtgttctttcagcagttactcttttgctctctatgtcctccactgccctatctgagatggtcattggggaagatcctctttttgggaggttgcatcattttgctagctcatctcctattaggttgagtttagatatttgaggatactcctaacattaaatagtcacaggctatcatcagtcagccttgagatttatttaacaatacattttcccttaaatattaggttttagaactatttgcttcttgttatttctgtaggcaagtaaccatggcaaagaccatgtctagccctagtttttttatcttggaatttctgtttcctagtaatccttcatgttctgctggtctaaatttagtttaatagcttatcccgatatcttcactggggatatttaaaaaatgaacttgcatggtagagggaaaggcaataacgttttattccttatctccataatgggcatggtatctctagtaatcttcgtaacgaacatgattctccctttcgttaagcagaacattaaatttttccacctttggcatgctatgattactgaaattttagacattcaggtttgaaatttgaagggtgctatttctaagtgtgtaggctacagggtttgctagcttcttataaccttgctcacgtaaggtaggagccgtctctgaaatacattacccaatttacatatggtgagcatcattgattcattaatggagagtcaatttataacttccattacctaaattaacgaaccacaaatttcacccattaaaacctatttttaacattaattttattgattagcaaggtctccagtaatgggaaataataataagcactaatggtggctacatttggagtgcagctcttctgattacctatcaacctggagtataaattctatatgatggcaactgacaatcattagagggtagggtaaatctggaaacacacatgtacatttatatcaaattatatacactaaagtcttttaaggtgaagtataataataacaaatttaaactgacttaactaatattcagtaccagtgagggtaagtagaaaaatcaagctctgtattaatttgacctaaaagctgccataacagaagaaaccagtagattaaaaggaaggaggcagaaaagtgtttatttaaaaccttcacagtttactgtttatgtccttcttcttatatacaaagttataaatctttgcttatttgatcagggttccagcttttttattttcttggttacaagatgactgccctcagtaacaagaaccacatgctttctcatttatcaagggagagaaaggagccacagcccacaattttggggctaaagtcctgtaattggtgccaatttgctcaaccctgaacaacatcttgtggccaggggaacaacgtaggttgggattgggttatcttaactggactaactttggagataaaggtgaggttaatttcacctcaatttcttaggtgtactatgcacaatgtgggaagagtggaataaatgttgggattgcaactacagtgtccatgataatcactttcaaagcatatatatatgtaacaactatattgttagttgcagttaaactagatctaagaatatgtaattgtgtctgacataattttttatgtttgattcttaacaagttttaagtccggctcctcacctgttcccttttgtatgatatctgaatctaggcaacttgatgagaaagcttgcctagatccaaatatggtgcaaaataggtatttcctattttggtgctggtggaaaatttgagccatacagtccctgccctgtgtgggctttttcacccaagcgccatgtcctagccatgaaaaaaatcccaatagctttttctcctactctctcaagtcattttaaaacctgcttaggaggtctgctgtactcttcctagaaaggctcattatgtgagtaataaacctttttataccctgttggtgcatatgtggtatgctaagtcttgaaataggagccaaagtttgggtgagggttcatctcatttctgtgggtgactgcaacagcacataaacttcaatggcagtttaaattcctgcaacctatctgctgtggtctgaatgtttttgtccccccacaattcatatgttaaacttaatcaccaatgagatagcgttaggaggtggggcctttgggaggtgattaaatcatgaggacacaagcctcatgactaggattactgcccttataaaagaggctccagagagccgccctgtctcttccaccacatgaggacacagctagaaggcacaatctatgacccagaaagcagggccccactagacatccaatctgctggtgtcttaatcttgaacttcttagactccagacctgtgagaaataaatttgcattcataagctacccagtatttttctatagcagcctgaacaaactaagataccatcattgtagtgtttcattattcttatcaccaagtgcccaatcttcctcttgatgactacagccagaaacctggaatatatcttcaattctttcttcttcttcttactcctccttttttttttttttttgaaagggtcttgctctgtcatccagctggaatgcagtggcacaatcacagctcactgcagcctccacctcccaggctccagtgatcctcctacctcagcctcccacattgctggggttacacgtataagccaccgtgactggcttctttcctccttttttgttggccatgtgcctttaaaatcctttctgccaatttcatgggtaccatctcggctcaggcagtcattaattcctcattttagttattttatgtcttctatctggtttgtttgtttttctagtcttggccccgtctctcctacccaataatccttcctctatactgctgctgaagtaattcttctccaaccttgcttaactaattcagcaatttcccattaccttcaggatacagttcaaactccttaacacagtttacaaaactcttcatcatcttacatctacatttcccatttctcctgctgcatacctgcataccacaatgtttgcttctatggtatgcttacctgcaaaatatacttacctccacagttcatagacaaggaaatatatacaaaggtatatgttcctttttctggagcatactcatgtctttccttagcttggtcaattccaatagattcttcaagactaatcctgagctttgatacattctatgagaagtacttcctgtttaacctaggctgagtgaggtgttctttctccaccttttagcaataacctttatttcagtgtttattatcactgtaatatctgatttgattgtatatttttctagatgtgattctcttaagggcaggcaccatgtttttcatctcagaaggtcacaaactattaggaaaatgggcttgcagatacatgtacaacaaagaataataattgaagatggctcatggaaaaagtattctgaaaagtaagagaggcacatgttctagagagacaagaaaaggcacaatagagaaattagagccctcatacattgctggtgagaaagtaaaatggtacagccactttggaaaacagtgtggtagttccacaaggggttaaacatagagttaccatatgaccccgcaattccactcttaggtatatatccaagagaaatgagaacatatgttgacacgaaaacttgtacatgaatgtcaacaggagcattattcataatattcaaaaagctgaaacaacccaaccgatgaagggactttgaaaacatgttaagtgaaagaagccagtcacaaaagaccacacattgcatgattccatttatatgaaatgttcaagatagacaaatgcatacagacggaaagtggattactggttgcctagggctggggagaggagggagaagttggggccaaagggtatggggtttctttttggggctgtgaaaatactctaaaatcgaatgtggtaaagcatgcataactctgtgaatatactaaaatcactgaattgtttataaagaaaaagattactgtggggaaggaagaaagatttcatggagttggtaggatttgaattcactgataaataagtgatataaaaagcaaagtgatgtgctatagtgaataaacaagcccttctgttgggcagatctggctttaaatccacttggtcaatttacacttcctaaatctgtaacctcatctaaagtgtaaatatattaatatacctactttgtaaaattattgtggtaagttatatatgggatttaaaatatttaatctaatgccaggcacatagcaaatattaataataaatattagttacttattataaatctgtttagtatggaatacagtttagtattgaatatcgggacagagtgaacatgtaagtacatcaatgggaaggaactcccagaaactaatctggtttccagcagaaagagatatgagagacaaaataatataaaggtaaccttactaagtttaagaaatatttatgaataccttttttctaactactagacactttgctagactgctggatacacaaagacaaatgagaagtgagtagattgctggatatacaagtgagaagtggtccttgacttggtagtctagtagacagataaaaaaatatgtgtaagaaagcattacatttcttacaatagaaatgttttttgtatgcataaagaagggggtgggctggaaaaagaatgtagtcaaggtgacttgctcaatactgaaactgctcattaactacttaggccagcacttatggcagacttgtcaggatgccttgctaatattttccacttccagtacagaacagagattacaggtttaagccaattttgttcaacagatgagaaacccagtgtccaaggatgaaagaatacttgttatacaaggaatgtgaatattccagagatttatgctcaaagtccccaggttagtgtctttctttctcactagactgtaagcttcttgaagacaaatatcttgagtgttaccttgctcactcttgaattgtcaaaacttggcccaggactaggtatgtggtatacaatcaataaaaatttgttgaatgaatgttcttcaaaatccttccatggcaaaaacagaagaaacattcacgagtggactgctagttgactgtttctctcatcgctattgacagtctgaaatggacaaagacatctatataatcattccttcctttcaaataaataatctgtgaattacgctattcttttcctattgcttcaggacaagctatttgacagaaagcttttaagaaaggctttgcaagaaaactctgcaacagagatggcacgtatgaattgctgtgatctggagttgaagacaagaacaaaagtaactctagagcagaattctttgaccaaagtcatcttactggttggcggaggctctcagtctacttgcatccggtgcttgagagttcagacaggcaaagatgagaggtagcatctagtcaacatccatttcttgagcacttactacatgtcagccactttgcttagtccccggttttactgtgctctgctaggaagtggtgaagagattcggcgggatcttcttaggaccaatcctacaaagttccagatggaactcattttgatttgggggacggtttacttgcagggattaggtggagaaacagggcctgctactcaagaggaatgagaaactgtaactaacaggaggtagactgggaaggagcatggcaaagtcaccccttttcacagggcaacgctccaaagaccacgctcaagctggggtggcagggctctgaacatggggccccgacccgggcctcggcctggggccacgtgacgcgcgtgtttacgttgagtgacgggcgctgtgttgggcgggccttggcggaaatcaacttccgggggcagaggtgttcgaagccgggtggtgcgtgggctaccccaacctgtgtggctgggccgcggtctcccctcaagggcctggggccgtgcctcgggtgtacgcgtaggggtctgtgtgctgggggtggctcaccgggcagcgtgggtgagcggcgcagcggcggcagcggagagcgagagaggggagcaggtaagtgaacgctcgccttccggggcctgggtcttggggtcggggccgcgcgaggcgagcggagagcgccccaccgggggaggagcgcggacgagcttccgccgcctgcagcccgcctgctgcggcctcgcccttggctgtcgcagcgaccaggagtcagggggcgtgaccaacctcctgcgggaacggagccagctcccgggggtgggagtgcccactcgttcctgcgctcgccggtgggtaccggtatctgcacgtcccagaatcgagtgttttcgaaagtctacgcccacgaacacgtgattattgtgtcaccgaagcgcctaccgaacggagaccttgattcttgcttagattacacagaacgcgcctggtttatgtatccccttttactttgccaagtacattggggtaaaagctctacagcgtctgccagccacatttccttagagtttcttgggccacatgttgcaataaaagtggcatttcagggtcaaggcaggagccagtaactttgccaagtggtgaggtatccttcgtccccgttagcacgcctccctttcccaacaataaagatattttctccatctgcgcgtgtcgcctactgcggaggaaagctttggacatgaaacctatttttggcttcactttaaggagtggaactctattaaaagctgcgctggtgtttttttggtaggatgatgttgctgctgctactctcacttgcttccttgatgagagttggggcagagctcgatttcctggagggtaaagtcttggccacaattttaggtgactcagcggccccttatgaattctgactctttccttccctcccctctcagctgtgcggatactgatgccacctttctctccaaatattaatccgggtgggagttggatgatggtttttggaagcagtttgcatgttgcgtggtggagttattggagtgggctgacattttacttcacaatttaaggcaacccttcccccccccacaatatttagttgggtggggtgacagggactgacaacaaattcgctgttgtgttccctgctgtcggagagttctacacttaatgatcacctgattgccctctgctacaatttctattgcgttgaggggattggttatactgtctgtacctattaggtaaatgtagtaagggtcatgccaggcagagtgcacctgcatggtgttggctaaccagtaaactgtgtggtagagaattgccctggttacgaagtttggtatcctccaggctgcctaggagggtgttctgtgggctgggaaatcttatgaactggtttcctagcaacagtataagcccaatggaataaacataaagaaaacaaagtgatgaaagttacaacttacctcttaacttttattaaatggaaaaatgtagcttcttattggagtgatccactcaaaacttctgagacatttttgtttattttgatcatcttagtacttaataacacacaaaagaaactgcagaaaatcattccagagggacatcactttggttttgggtggcattaaaatagagaaaaaagacgtttaaaaatgagcttgtctggagcttaaatggacaaacaggaatttggtgtaataggcattttatgttgtactcttatctatatgtgtcagatgtatgcattacatatgattgttatgaatgaagatagtagaagacggagtgggagtggagtagagtggatgggtggataagactggttccattaagtaaaatggaaggggaatgttttagataagttgttcccaaactgtaggtcataattacagcactcctttgtcaacctgttccttgtgatttttaatcttccttgaaagtttatcaaattttcttattttctgtccaaacaatgagaacttaattgaaaaaggcatctctctttggattaactcttggtgtttatgtatatctgtttcttatttactaacgataaattaatattttagatttccagtattttaaggatttttggtctccttactgttcctccctgccctattcccatacccagtaagtttggtttagctcatttaaactgatgcatatttttaaaaagggcatatgttgctttttttaaaaaaaatcaagttttattgaggtatgatttataagtaaaaaagtaatttttattatattgctgtataaagtctgacaaatgcatataatggaaccactgccacaatccagacaaataatattcccatcattctaaagtttcctcccctcactcataggtcctagcaaccactgatctgttctctgtccctgtctatagctttgtcttttctggtatgttatgtaaatggaatcatacagtatgtagccttatgtttcaggtttctttcacttaatgctttgattcatccatgttgatgcatgtttgttgatgcttggttgttttttacagctgagtagtatttcattgtgtgaatatatcatagtatgtttattcgccatttgatgaacaatttttggcatttaggaatgaaggtactgtaaacattcatgtgctgttctttgtacattaaggtgcaagtctttgtgtagacatatgttttcatttcttttggttacacatctaggaatggaattcttgggccgtgtgcaagtgcatgtttaaccttaaaagaaattaccagctgggcgcagtggctcagacttgtaatcccagcactttgggaggccgaggtgggcagctcacgaggtcaggagattgagaccatcctggtcaacatggtgaaactccgtctctactaaaaatacaaaaattagctgggcgtggttgcgggtgcctgtaatcccagctactcaggaggctgaggcaggagaactgcttgaaccagggagtcggaggttacagtgagctaagatcgtgccactgcactccagactggtgacagagtgaaactccgtctcaaaaacaaaaaaaaaaaaaagaaggaaattaccaaactgttttccaaggtagctgtttcattttgcattcccgcaagtgatgtttgatgttccagttgctccacattctggtcagcacttgtcattttatttttaatgttagctattctaatatgcgtttagtgaaaacccatttatgttttaatttgaatttttcttctaacatattgagcgtcttttcctgtgctattatttgccatctgtgtatcttctttgattaagtgtctgctgaaatcgtttgttcctttttaatagggttgtttgttattggtttgcaagtgttttatacagtctggatacaaattcattatcgtatatatgttcacagcatttccttcgagtctgagtctgtagtttgtcctttcattttcttaacagtatctttcaaagagcagaagttttaaattttggtgaagtccagtttatcagttttttctcttatgatttgtgcttttttatcatgagaaattttgcctaatccaacgttgcaaagattttttttcttatgttttcttccagaacttttatagctttaaattttagatttaggtctgtgaccaatttcgagttaatttttgcatatagtgtgaggtaggggtcaagactctctctctctctttctctctctgtgtgtgtgtgtatggatgccccagtcttgcagcaccatctcttgaaaaagactattcttactgtgtccagaattggttccttccagtgggttcttggtcttgctgacctcaagaatgaaggcacggaccctcgcagtgagtgttacagttcttgaagatggtgtgtccggagtttgttcctccagaagttcagatgtgtctggagtttcttccttctggtgggtccatggtcttgccgacttcaggagcaaagccacagacctttgcagtgagtgatacagctcttaaaggtggcgcatccgaaattgttcattcctcctggtgggtttgtggccttgctggcttcaggagtgaagctgcatccgaaattgttcattcctcctggtgggtttgtggccttgctggcttcaggagtgaagctgcagacctttgcggtgagtgttacagctcatagaggtggcgtgtcctgagttgtttgttcctcccagtgggtttgtggtctcgctggcctcaggagtgaagctgtagacctttgtggtgggtgttgcagctcattgttatagctcgtaaaggtggcgtgtccggagttgttcgttcttcctggtgggttcgtggtctcgctggcttcaggagtgaagctgcataccttcactgtgagtgttacagctcataaagatagtgcggacccaaagagtgagcagcagcaagatttattgcgaacagtgaaagaacaaagcttccacagcatggaaggggacccgaaggggttgctgctgctggctcgggtggcctgcttttattcccttatttggccccactcacatcctgcagattggtccatttacagagagctgattggtccattttacagagtgctgattggtccgttttacagagtgctgattggtccgttttgccagagtgttgattggtgcatttacaaacctttagctagacacagagcgctgattggtgcatttacaatcctttagctacacagaaaagttctccaagtcccctacccgattagctagacacagagtgctgattggtgcgtttacaaactgttagctagacacagactctgattggtgcatttacaatcctttagctagatagaaaagttctccaagtccccacctgacccggaagtccagccggcttcacctctcattactatcttttcttcattaaatttctttggcttgccttgttaaaaatcagttgagtatgtttgtgtggtttgctttgtggactctattttgttccattgttctgtgcgtctgtttggctaaaacctcagtccttattatggtagcgttatagtgtatcttgaagtcaaaaagcctgagtcctccaactttgttgttgtttgccaaaaatttttgagtattcgagttctttttctttccatgtacattttagaatctctttatttctatataaaagcattgtggaatttttagtatgattgcattgaagttatggatccatttggggagaattgacatcttaaaaatgttgttttctaatccattaataaaatacctttcctgtcccactgctatggctcatgcttgtaatcccagcactttgggaggtcaaggtgggaggatcgcttgagcccaggagttcaagagcagcttggacaacatggcaaaaccgcatctctacaaaaatgagaaaaattagctgggtgtgttgccatgcacctgtagtccctgatacttggaaggctgaggtgggaggattgattgagcctgggaggtagaggctgcagtgagttgtgatcatgccactgcactctagcctctgcaacagagagagcctctttcaagagagaaaacaaaatgaaacaacctttctacgtttatttggtctttgatttctctctgtttttaagctttccgcataaaaatgttgcgcatattttgttatgtttgtatctaaatgttttatgttgtttggttctgttgtaaacagtaacctttaaaaatttttaaatttccaattacttatgtaagtgaatcagtattttaatattgatcttgaatttttgaattttacaaccttgttaaactcacgagttcgttctagtagcttttgtagctactgctgtctgctggtagagacagctttatttcacattttctcatttgtttgccttttattttgttttcttgtctctttgcactggctaggacctttgctaatgttaactagaacaagtcagatcagcacagatatccttgcattgctcttcatcttagtagagaaggtatacagtcttttaccattgagtagttagctgtaagttttttgtggatatcattttgacccagccaaggaagttctctttaactcctgcttagagctttaaaatttaatcacaagtgaatgttatattgctttttttgattgtgaacatgatagttgattacagtagaaagttggaaataaaggaagactataaaaaaagttaccctattttcagtaatctgaggtaactgctgcaaacattgtggtggcttttctttcagtcttttcttttgcaaatatattttaaaaacaaaattgttaatattgttttatattttgcccttttcactcagaatcacattgggagtacttgcatcatgaattattttgaaaacttgatttgtaatggttatgggttattgtgttatatggatatgcccatcatttaatgattttcttattgttaaatagtaaaattgtatttcagttttccctgttgaaattaacattaaatatttgtgcttaactctgataatttttcaaagtaatttataaaaatatgattatcactcaaagtatatacatttttttttcaggttcttatatccactgcctctgtttggtgctcttgaaatttgttctttaggctatttattgtaagaaatttggggtcagtatcattggctttttgggcatcaccttaaggtagaatctttgaatttcagaaacagagttccttagaaatcggtctagttcaaaccgttttttaagcggtttagagtctgtaatcattaaataacttttctgcctatactattttgtttccactgatctatacagaattactgatgaattacgtataatgtaatataccacctgtgctcttcttttgataagaattatagaaatctttgtgcctagcttcatgtaaaaccctttatgtatgttgttttattgaattccaactgctactttttggtagtaacatttttttccatttcatagacaaaggaaactgtctccaagtgagcaaacttacctaaggttgtattaatagtaagtggtagagcttgagtttgttcacaagtcttcctgaatctgtgcttttatttgtaggctatactatgagtattatgttattttaggtattttgtatatattatgtttattttgaatatattaattttaatgctaacaataaatttactaagcagattagcaaattagcatgagatgttatcagtacttctgaaatgtttgtccaaatttatatcctcttaagtctattcttattttctaagtggcgtaaagattattgttggctatatgccatacaattttacttaaataattaggatcatatttactgtgactagtagaggatacaacaatttatttattttgaaatgtgaagaattttgtaattataggtttaataaatggagataaaaaataatgttaattactttataaaatgagctctgttataattctggtaaaacaatttgttttccttagaaggatatgtacattttggtatttacatttcaacatggactatgtgaatgaaataattagtttgtgaagtatgaaatcactttttccttgtattcagagaaggttggcttttctgtgtctaccacctcctatgttttttattatattcagccctgtggttaaagagtaggtctacatagtcattttaaaaagctgcttacattttatattatgagaattcagaacttctgcaattgtagtaaagacagtgctgcagtgttatgcaagatccattaatctatgaatatgcttcactgacagatgggcttatatgaatattatttaaaaactacatgcttagacatcagtaaaagatagtgattaaagatgagattaagtatcattttaattacgaattttatacagacaacttaaaattaggttagaccttttgcttagtttgccaaaattgggcatgaaaaacaaaataagcctgtgaaagctgaatgacattaaatgggccaccctgaatcagaagacaagtggcaatgaatacctattttccattttgctgaatgagaagaatgtttaataaatggtgatagttttcatgagatatttagatattttaagttttatctcttgttggttatgcagaagagatttatttctctttttattcagtctagcaatttctgacttatgagtggagtgttgaatccatttacaattaatgtatttactaatgcttaaggtagtatttatgtctgtcattttgctattttttctgtatatcaagtaatttttttcattccttaattactacattattgctttctctgcctttttttgtattaagtatatattttctaatgtaccattttaatttccttgatgtttctctttttttttttttaagagacagaatcgcctaagctgaagtgtagtggcgccatcatagctcactgcagcctccagctccttggctcaagtgattctcctgcctgagcctccctagtagctaggactacaggtgtgtgccacgatgcttggataatttttttattttttgtagagacaggttcttactctgttgcctgagctggtcttgaactcctggccgcaagtgatcctcttaccttggccttccaagtgctgggaatacagttgtgagccactgcacccggccttgacgtttcttttactaaatattttttgagttctcagtggttgccctgggacttacaaatagtaccttattttataacaatctatattaattaatactaactaagtttaagtttacaaattttgttcctatatattccctccccttccttcatgctattattgtgtaagttacatctttctacattaatacagtatccattaacactgatttataattcttgatttatgcagctgtcttttcaatcacataggagaaaagagccacaaccaaacatacatttatattttcttttatatttacctatgtagttatctttaccagtgttcttaatttctttatgtagattcaagtatactgtctcttgtcctttcagttcagcctgagagacccaggttagtatttctcatagataagatgtgctagcatacattctctttggttttgtttatctgagaaagtcataatttcttcatattcaaagaatagttttgctagaattagaattcttagttggcagtctttttcttttaggaatttgaatgtatctttccactgcctctggcctccgtggtttttagtgagaaatcagataggaaatctttttgacgattccctatttttgatgagttgcttctctcttgttgctttcagtattctctctttatgtttcgaaagtttggttatgatgtgttacagtgtggatctcttgaattttatcctactttgagtttattgagcttcttagatgtatagattaatgcttttcatcaaattagagaagtttccttgtatcgtttcttcaaatattctttctgttccttcctttttctcctctttttctggttctctcattatgcatatgttggtatgcttgatggtttcctataggtctttgatgctctgtttatttttcttcattcttttttcattctgttccttagcctggataatctcaattgacctatcttcaagttcactgatttttgtgccagctcaaatgtgcagttgaactcttctagtgaatttttttttttttttgagtggtagcttttctatgtttctttttatttatttatttatttatttttattgattattcttgggtgtttctcgcagagggggatttggcagggtcataggacaatagtggagggaaggtcagcagataaacaagtgaacaaaggtctctggttttcctaggcagaggaccctgcggccttccgcagtgtttgtgtccctgggtacttgagattagggagtggtgatgactcttaacgagcatgctgccttcaagcatctgtttaacaaagcacatcttgcaccgcccttaatccatttaaccctgagtggacacagcacatgattcagagagcacagggttgggggtaaggtcacagatcaacaggataagaatttttcttagtacagaacaaaatgaaaagtctcccatgtctacctctttctacacagacacagcaaccatccgatttctcaatcttttccccacctttcccccctttctattccacaaaaccgccattgtcatcatggcctgttctcaatgagctgttgggtacacctcccagacggggtggtggccgggcagaggggctcctcacttcccagtaggggcggctgggcagaggcgcccctcacctcccagacagggcggctggccgggcggggggctgaccccgccacctcccttccggacggggcggctggccgggcagggggctgaccccccaacctccctcccggacggggcggctggccgggcggggggctgacccccccacctccctcccggatggggcggctggccgggcagaggggctcctcacttcccagtagaggcggcagggcagaggcgcccctcacctcccggacggggcggctggccgggcggggggctgacccccacctccctcccggacgaggtggctgctgggcggagacgctcctcacttcccagacggggtgactgctgggcggaggggctcctcacttctcagacggggcggctgcagggcggaggggctcctcacttctcagacgggcggttgccaggcggagggtctcctcacttctcagacggggcggccgggcagagacgctcctcacctcccagacggggtcgcggccaggtagaggagctcctcacatcccaggcggggcagcggggcagaggctctccccacatctcaggcgatgggcggccaggcagagacgctcctcacttcctagatgggatggcgactgggaagaggcgctcgtcacttcctagatgggatggcggccgggcagagacgctcctcactttccagactgggcagccaggcagaggggctcctcacgtcccaggcgatgggcggccaggcagagacgctcctcacttcccagacggggtggcggccgggcagaggctgcaatctgggcactttgggaggccaaggcaggcggctgggaggtggaggttgtagcgagccgagatcatgccactgcactccagcctgggcatcattgagcactgagtgaaccagactccgtctgcaatcccggcaccccaggaggccgaggctggcggatcactcgcggctaggagctggagaccagcccggccaacacagcgaaaccccgtctccaccaaaaaaatacaaaaaccagtgaggcgtggcgtcgcgtgcctgcaatagcaggcactgggcaggctgaggcaggagaatcaggcagggaggttgcagtgagccgagatggcagcagtacagtccagcttcggctcggcatcgggagagggagagggagagggagagggttttctatgtttcttctctagtgaatttttgaattaaattattatactttttaattccacaatgtttgtttctttattttgtaatctctatctcttcattaataatctctatttggtgagatattgttatcatacttcatatatggttttctttagctctttgaaactgtatctaagaaaatatttagagaaaacgttttagtgtctttgtctcataagtccaatgtctgggcttccttagggacaattaactgccttttttctctccatgtatagatcatcctttcttgtctcttgcatgtctcacaattttttgttgaaaattagataattaaataatatctaatgtggtaactctggaaatcagattctccttctcagggtttcttcttgttgctgctcttgttatttgtttgcatagtgactttcctgaactctttatgtaaactttgtattcttttatgtgtggccaccaaagtctctgcatggttagtactggacagcgaatgattggacagttatttccctaatgcttggaagcaatgagtctcccagcctttgctggtggtctctgtgtgcatgatggggcatgccttcaatgcttagacaggcagtttataactctactttagcttttagttcccacttgtacagagcttaaagtgtagcaagaagtcaaagcttaggtcaccttttcaattctttactgagtacttgcatgagcttggccatctggagttcaaggaatatgttggatcttatcaaaatcccctattgacatttcattacctagcttttccttttaagattctggtcagcttgttgtttgccccaactgttactgccacctcaggcaagctgatgttaaacagttggctctgtttgtttttgacaaatgctatctggggaaaaggttattggcactggacaagctcttaggtcaaataaagacaagtaaaggagtggtgttttccagggaactgccagacaggtcaataatgacaatttctgggaatggggttttggaggaggtccaaccctattttgcccctcctggtggctgctaggctgctggattttattgtgatttttgagccttctagttttcaaggctctcatggtactggggatagagggatgagattaaaatgccataaaacttgcttttcttaatgaaaatcagccatttttctgtaatatgttcttcctagattgatgcaagcctttgattaatttctagagttctgaaaaaagttgactttgacaatttttgccactgttgttcttgctttatggaggaaaggatttttggagttccttaactccactattcctgctgatgtcactgtgtagtattttaatagcccaagttcttcttaatgtcaccttatcccaattatacttatattccaccactttgcttcatgtttatcatctgtggtatacagctgcatataagagatcatttagggattattctaattcagatatgtaaaaatttcccatatgtagcaaaccatttaacaatattaggcatctgcttagtgctgtgaaaattctgcaggatgaaaattacaatctgttcctaaatttagggaggtgtctgcagtatagttaggaatttatacatgtagaaaaagttgaattgttgattatatgagtgaaagagatctgataaggtagaacgtaagctacttttattaataataagtagtatggtgcagacatagaacattattagccattatgtaattttgttcttaaataatttgagtcagttttgaatagaggaaatcttcagtttaggcttgtgaattatggctaaaaattcaattgaattgccaaaatgattatactgaatattattaaacactgtgtgctatgcctgaacatattacttggagaaattagattttctggttaatggaatttcctagttaaaaaaaacaaccagaagcccagtttttccttgattttgtgaaaatgtctagacatgtatttgtgggttttgatgccttaattattgaaggtaaatgatctctccctctgtccctttttaaagcatttaactgaatgcttatcaagctatggtacctggcagtcataattgagaatattattttccagtgctgtagaagagagtcacatgattggtgccctcaaaaaattggtaagaacatggggttaaaatgtagctgtattgcatcttcgggttcttacgatatgaatatatgtgagtttttgtgttttatttaatttatatcacttttctgcatgaggaagacattaatggtttgcagatgttgtaaatgattactagagatgctttttcatgctcatattagccagtccctgatatgcatttattttgattattaattttctgattaaaaataaaatgatgcatactggcattttttggggaagtaatgctatgatatatttcatcattcagaatgcaaaattagcaattcctagtgtaagcaatttcaaattttcacactcatcatgaatttaaggatgcaaaggacctgctttatattcctgcatttttttgtgagggaaagtcatgttaggtatttctaagatgtatttttctcttctctttactctccttattacatttgaatcatgtgtagttttaagctaggtatttatttacttatttgttaccagacaggtgtctcatgtttgggtggtatatattgctgccaaaggctcaccacagagttgctcaaggtgaagagagtgggtttctagaagtacagctaattcttctgtagcgtctagttagtgtaaaatataaaaaatcaaccaaatacatttatacacaattaaaggaatacttatacgcaattataggaatttagtaaataaaactttttagtatcattgctaccatgcataattaacatttttaagatttattacgtatttactcagtagaggaacagaatcagttgacatttctttaggaccctgacattatggcatatgaagaatgttgggagtgcctagattgcctgttggaaagccttggatttttagttaatgactcggctagtcttcataatggtgaagaggaaaactctttcagatattgctcataggatgtcagttttgtcaggaatatgctcaattatagagagaaaggagagtgaagagagaagggagaatgaagagggaaaggcgaatgaaggtgtgcttcagactttttttttttaacatgcaagtctaatagttatattgagtggattaaagtctatatgaattagaagtcatttatagatactggtactcaattacatattaagtacagaggtaaaaaaaaatgacaggttattcatactaaagtcaggatgagatgaaaaatgtgctgagtataccagcacttttaattcaaggaaaaatgaaaatgagtggttaaaacaagtgttaaaagaaaaacttcagccaaattaaatttaaaggagtttaattgagcaatgaacaatttgcaagttgggcagctcccagaattacagcaaattcaaagagactgtattgcagccacacggtggaagaagttttgtagacaaaaaagaaatgacatacagcaattggaagtgaggtatagaacatttggattggttcccttatttgaacacagtttaaacactcagcagtgtatgaatggttgaagtctttctgctggaattggctaagactcagctattgttacagacgcatactcctaagttaggttttcagtcttgtcaacctattaagttaggttgcagttggtccacaaagactcaaatatacaagtatagagtccttctcaggccatatttggtttgctttagcagttctccccttttgctcattttctcaatttttgagagattgagcacaactttagtcattaatgtcacaatcattgtagtaaatgtacttatttggtcttgaaacccaccaggaaacagtagaacagtgagttttgcaaaggtaggaacaagagtacctccttatgctggaatgtcctgtttacaggggaaaaacaaaccaggtctgttctcctgtaggatctatgtgtttccttaaagtcttagtttgattatgtcacattcagcatgagcaactccagttttgtttggtttggtctgttggggcctagtgagtgagctcagtctaaaacaatggccacccataattttgtttaaaaaaattccacctttttggtcaggttctcaggtgagagtgtgaccaaaacttagggccttagcaccactctctgttaacatcatttgggtttccagtctcagcatgtcattcataggttacagtatcctcatggtcacacatttctttcagctcttgtcattccacttgaagagagaccgttagatattctagagatggctgcatgcaaacatttaaaacctttgagagaatacagtgcactagggagactattattatgactacgggaggataataccaagggtttggagtatgctccttacctagggtccccataaaccaaacctcctaaactcaaatagatcagagaatgagctagataaagagtctactcacttaactaagtagttttttcattaatcccctgcaactgagtttctataatacctgatgttttctctataggtcgtaagtgccagtggctgcaggtacttctgtgtttagccacttaatactatttagcatgacttttacaagagaatttaaagtctgttgtgtaaccctagcctttacagtatataaagcctatcatgctatagagcctatcatgagggatacatttctaatcattgcctcttttattccaaaccgtggaaaaaggacctaacaaatgatgcccttccagggaagtgaaggcctccaggcaatgttttctttaacctaggttgtgggttaagaggagtgaatcaatgttctgtttctgactgattatgaggcaaagtttctcactcacattgggccttcatcttttatctctcaaagtgtaagattatccatgtataaggctggctgcaaaattcttcacaaatgaaagtatatcctgtaagtgcatacaacagaccttttttccacttctattgttcatagagacataagcaaggaagaaaatattcaaagataagagtctaatgatagtagagaaatcttaatctgtgatcttgggaaaagctgttcacatcaaggatgctgtcttcttctggggagaaacttctctggttagctttaccttaaggatttcaatgggtgtacagttccaagagtgtggagggacccttctcagttgtgagattatgaacccaaggttcaaggttccaaagttttgttgcagaatggatggcaagggcagtctttctctgatgttctcagaagatccagtctttggattctgaaggggttaattgtcctcaaaaccataaaaagctttattgacctgatgaaaatacactgggcacaataatttcgtgttataagatcagtcctcttgcatgggaaagtttgtatacaaccagaaaacatgcattgaaaatgacaaatgaaatccctttataaatgtttaaatggcccatcaggtaggcaaatgtacctgaagctttgattgtcttctgaagaatatggaatggaacattggttataaactattttcacaatttataagtcaccacatcaatatatttaatttggatcattttatcttttccgtgatgagtcatggaatgcagaacttttaataataaaaggtttaaggactcaataaggacaaggcagctgttctggtttttcatgagtccatgcttaacattggacttgattctccaaattaggtgcatagcactgataactgataggttatcataggtaatttgacttagaccatggattttattcaaattgtgtatctaaataatttcagtatttgctcatttagcatgaaaatctggcaaagtatttccttggtatttaattaatttttgttctacttggattagcagttttataacccagtcagtcttttcattaaagttccaggaattcttacccagttcaaatgacatgattctaaagctattagaaacctgtattcaagagtacttttcagggtcctctccatctttcatgaacctcctgaaagacgccatgcttttgaaattttgagaaactgcatcagcattaagcaattaactgtggaaatgactttaaatagttataattaaaaacacaattgacaaagaaatttggttatttctgtggtctacaataacttaacataactttaattatgattgatagcatatactcagacataatagaattttagaagtcccatacaattttggaacatatattaatataattcactaaagtataacttggagactaaacattatttttattttgataaagtttcccatgtaacttaacatgccaaataatcctgtttacctgtctcttaaatgcttcaggggccctctggagcattccaaagttggatgtcagaaaagaccattttaaaggtgaaatttgattttgagaagcctatcaaatattttaaaggtttaaaatacttgatattatgaaatagaatccaggttactgtaagtcattcatttagccaaaatgatgatttaaaaaatttttaaaaaggtaaaaatctttactcattgatagagggaagacttaacttttgtctcttgtctttcccttcctttttggtagtttattcaaaaggcaaagaaaatctttcattattttattttattttattttttgagatggagtcttgctctgtcacccaggctggagtgcagtggcatgatcttggctcactgcaagctctgcctcccgggttcacgccattctcctgcttcagcctcctgagtagctgggactacaggtgcctgccaccatgcccggctaattttttttttttgtatttttagtagagatgaggtttcaccatgttagccaggatggtcttgatctcctgacctcatgatctgcctgcctcagcctcccaaagtgctgggattacaggcgtgagccaccatacctggcccattatcttttaatagttcatgaaaatattgttcaagagagaaagccaaatttcacccttgcattagtctactattaatgtcaatcccaatttttaataaaccttataaacaaatcaattcaatcttggtttgaccataaggtgagattctcataaaccttttataaccttttacaatttttgtgaaagagaaggttagtgctttaagaaaaaccctgttgtgcttttattcccattttcaatttatggaaaagctgaaaaataccactttaaatttggccaatgtgttcacacacagaatttctttaataacgttaattatttattatttcttcttcttcttcttcttatttttttgagacagagtttcactctttcgcccgtggtgtgatctcggctcactgcaacctcggcccctgggttcaagtgattctcctgcctcagccctccgagtagctgggattacaggtgcccgccaccaggcctggctcatttttgtatttttagtagagacagggtttcgtcatgttgaccaggctggtcttgatctcctgacctcaagtgatccacctgcctcagcctcccaaagtgctaggattatagatgtgagttgctacacccagctcaagattttttataacactttcacaacttgtttaaaactttagctttatctaattttaaacaatcctttaaccctttaaactttgcaaaaatttacatcccatgctttcttataatcttttaccaaaacacatttcattctcctcatactttgcatgtaaacctatttttttcagtagtctcaattatatgttaaaatggtaattcttagcaactttcacttttggtgcataaatttcttttcattaatcctttcataacttccgtagaccatctacaacatgcttgtactttctgacttgtcctaaacatccttctttttaaacaaccagtcattttttactttaggacaataatttaccatacaagatcctttcttatataaaatctcttttctttataaccctctttgcatagctagggaacttggctaattccatatgtccccagggctttaaagtcaaggcagtgtatgaccttaaagcatttaacaaacctagtatctgacctgaataatttagatcgtatatctttatttttgccaaaaatctttaaaatgttttatttcccaaagattactaaattcacttgaactaaaaggcattacagtttttatttttctttcaaaatatttaagtgcctatttttctttaaaccaattaattagagctcttttatataaacattacacacacaacacatatataactgcacagacagaagattattacagttgttgtaagtttctatttaccagtttctaagtttttaaattggattactggctataggatgaagtctttggaagaacagggccaggaaagggtctctggtgcctcctgtttttcccaaggagtcccaggctgttagagcttgaatatctgcttttaattaagctgacttttaagcataggactctttaataaaagttcttataaattttttattacctgactttagccaggacaaacagctgatatttttgtgtttaaagatagaaaaattgaagatgatttgtggagggtaagataattaaaaaatggtaaaggacacccaaatatcaagcagaaagtactcattgcctaagctgggaattgcaccctgagccagcagccattgtgatggcagagactgagacagtattgccaaatagttacaaagtcaagcttccagggacatacaaaacaagacggagtctcatttattattatttttttctttttcttctttcaggtatctgcagcaaaggttattactgaccagtttgctgggccatcttgaacagcgaggcttccagggttttaggcacgtattttgtcctaaggtacccctctttatgacagaacaatacagaaagactaagcacactagattcactacagcttaagaccagcctcagaattcttttttgtgttaattaaaacttcacagaggagataaacagtgatttttaccattcatttaaccagtttgaacagagaaaaagaggccagaaatctgagtggtaagaaattcttacccctttgccaacatgccaagcctctgggtttcctttccctgagtggccctagtgacctggctcaccgcaccataaccctgaggcccaagccacaacacaaaggaaaattatctttttccattctggccagtgcaaaatacgtgtgacaaaacatagacattagcgagtctgcctagcacccaatatcagactggcaggtttcaaaattgcccccagatgggccccatcatccctaaatcttttttagaagcttctgcatattaataggcatccctagatgagattaatttgggaaacttcatttttaaatgcacttctgtagattgttgttcacttggaatgttttactgtaagttatgtttagtaagattttgtcatttctgtaagagttcgttgcctcttgggtctaatgtgtaagctggaaggaactcagttttctagaaattaaggatcccattttttacctaaaatgttggctttactctcaggttctcttgattaacttagccagttcttttttttttttcttacctaagcacaccagaaaaatgaaacaaaggggtagaatgtaaaaatccctgtgtgaattttcaaatgccaaattttataacccctacaatattacagtttgctaccagtttctttgtgacccagtcagatgtaagaggcctctaactggtccctagccagttaatttctggatcaaatccattcctggacccagtccagtttctgtcatgacttccaaacccagtttggattagaaatttggtcaaagaaactcagagagctcaaaacacaaatccatggagttctgaaatccaagagagaacttaccgcaatccccagccactgtgagatcagtggacacaaatgggtcctgcaggtaccttgcttgttcactcagtgctcctgggggtcgttagaagctctgctttggatcccgcttctgacactatctgttaaaagtgaagcttcagccatattaaatttaaaggagtttaattgggcaatgaacgatttgtgaattgggtagcccccagaatcacagcagattcaaagagactccagtgtggtggccacatggtggaagatttatagacaaaaaaaggaaatgaagtacagaaatgggaagtgaggtacagaacagcttgattgtttacaggttggtgtttgccttatttgaacacagtttgaatgctcagcagtgtatgaatcattgaaatatggccactgggattggccaagactcagctcttttacaggcgcatacccctaagttaggttttcagtcttgtcaacctattaagataggtgcagttcatccacaaggactcagatatagaagtatggaatccctctcaggccatatttagttttctttaacacaagttttctatcatcttgggaaaatgtgagcaaactagttatttatgtgtttcccttggtgaacaagtccgttttttattaatgaggcactactagcagacctttgattgatgcataagcaaagatttactaactgccaaaactgagtctatgaaagttaaataatggagaactgaggtatgttgagaagcaaaattcagtttaatagaaatctttatttgagtcctgactatatttcaagtacctgtactaggcattgggggatacaggagtaagtgccactctgggtcttcaaagacctcacagtcaattatttaagagttttaataaacaaataagttatagtgagtttattgattgggaaggaatgggatcttgaaaattggaatggggatgcatggaaagaccctgatgaagctggggactttgaatccctaaattctgatgagtcttctttgccagttgaagagacccccacacacctagtgggaatggcctctttacccacctcccctctgcccctcctttccccccaggggaattaattctgcattgcccaagcaaactgtaatggctttccctgaggaagttggcatgcaagacaattctcaagacctctccccaccgactcctctttgtttctagacctataactacactcaagtcttagtaggcccctaaagatgaggcacaaagtgtgacccatgaagacatgtactacactctgaaataaatgcttaagttttctatttatacagacaaaagtccagagaacatgtgtgatcatgcatattaagggtataggataatgtcagaaggaacataaagctggatcagaccaaatctattgatatgggctcactaagcagagattctgcagcttggggaattataaaaggctctaacattttgttttcttagtttgctcccatcatgaaagggacagtgttttgttcttattcctgctggagtagacattgaatatagatttcctttccctgcatgcattgcttctgccaaaactaccagacatggatttaaagaataccttatctactatcatggtattaatattacacacagcattatttctgatcaaagaactcacctcacagcaaaagaaatgtggcagtgggcccatgttcatggaattgactggtcttaagatggtctctactgtagtgaaacagctgacttgatagaatggtggaatggctttttgaagactcaattatggtgccagcttggtggcagtgccttgaaaggctggtgcaggattctccagaaggctgtatatatgctggatcagtttccaatatatggtgctctttcttccattgccaggattcatggatccaagaatcaaggggtggaaacaggagtggcaccagtcattattatctctagtgacttgctagcaaaatttttgcttcctgttcctgtgaacttatgctttgatgacctagagatcttagttccagatggtggaatgcttttaccaggaaataaaacagtgattcagttgaaatggaagattctagcctggtcactttggactcctcatatctctgaatcaataggcaaagaagagagttactgtgctggcttgactgattgatcttaactaccaatgagaaattagattgctgttctataatggaggtagagtatgtctggaatacagggtatcccttaggatgtcttggtcagtggaaaactgaccaacccaacccaacccaagcaggagtactatgatccagatccttcaggaatgaaagttagggtcaccccactgggtaaacagtcacaaccagatgaggtgattggtgaaggcaaagcaaatacaaaataggcagtggaagaagatagttattaataccagctattaatacagaaacaaggcctgtaattgtcatgtgtatttccatcttattttgttatgtttgtgtgtgtgtgtgtgtttgttttctgtcctcttttattcccttgtcatgtaatataagatagttcgactatatataatagtatttaagtattgtttgctttacatcatagtgtttaaattacaggatatcaagggaaatagaaatgtcattcaaaatctttacttcctcttcttggaaaggggctaatacatttccagttgtagtcaggatagttgcatcacgttaggtggaattatgaccttgttattttctttatttggagactaaatatgatttgaggaggtgcagatgtgtgccaagtggacttgtgatgcttaattttatgtgtcaacttgactaggccatgaggtactcacagatttgattaaacattattctaggtatgtctttgagagtatttttggatattaacatttgaattggtagactgagtaaagcatattttcctccttaatatgggtagccctcatccactcaattgaacatgtgagtagaatgaaacagttgtataataagaaactgctacttcttgactgcttgagctggaatgccagtcttctcttgtacttggactgtaacttacactattggcttttctagttctcaggccattggactcagactagaacttacaccatcagctttccttgttgtcaggcttaacattattgattctcctagctttccagcttgctgactgcatatctttggacatcctggcttctataatcttgtgagccaatttctgaaattaatgtttctctctttatttatatacacacatatacctcctcttagttctctttttctggagaaccctgattaatatgcttaccaaaaaagtagaaaattagttgattatttcctcttccagtataaccaacagtttgtggttggcatgatgtaatgtcagatatgaagctaataaaattttgaaataatgtaggattatcttaccactgtatctattaagaagagtggcctttagcttacttcataatttgcctttattctttgtggtatcccaaaggcaacttaagaaataaatgactaaatactatgtaaaaggaagatgaaaaaaagtgaaatgcttaaaatgcctagtacaagcagaatttatagtaaatattttagaaagccagacatagacagaagcagtggatgtacactgtcaagtatatgaacatttaacaaaagtgacacatacctgctgtggcttcaatatatttggtaattctcaggaattgatacatcttttttaattttcaccacaatgccattttagattattgaagatagtcattatgcccgttttccctgttgagggctaaaatgttaatcagatatactggttaaagatttaatatacttaaaatggaatcttatgctgaataatgctgcttaaattaaaaagagaggagaaacccatcaatagcaatacttagtagtacttaatcgttgttgttttgtttttttaagtaaagaaggagtaatcatgaagactctaggatttcctctttgatcaaaagcttttaggagaaaagaatgatcctttggatattttcagcatttaaagctgtctaattaccatacattctttccattgtgattgtgtagcaatgctgaggtttggaattatgcagatcatttaagctttctttgttgttcatcaactctcactagaatcctttctctgtgtttctcacgttggattatatagcaagcttttgttggttcttagctttagaaaatgtagtcattttctaagcacagcaaatatgtatttctcttgcaattcagttactttaacatggtttcagtaagtaaaataaaatatatatagtgcctcaaaaatatcacagaattcagttatgctaccgagaaagttgtgccatctttttgggaacttatgtgtaatgaactggtggactttgtctactctcccggaggaaggtaatcataataattgaataaaacaccattaattggttttgtatgtagagaagttggggtgtgtgtttgtgagtgtgtataaactgtagcattctttttatatagttatatattttttattcattcttaaaataaggtaacaggcaatcgttgagagcagtgttcttataattgctctcttcatctatgaaactgaaatttcttgatggctttaagtgtgtttgttcaggagagaaaatcattgtgagggaagtaaatagaatgttactttcatgttaagggattctttgttttagccttttagaatataaacatcagagaatatcataagcatcagggaatcacttgtaatgatggtaaaggaaccaacacttcagagaattgcacttacacttaaagacctgtcagagaatgtttaaaattagaaacaacttaaatgtgtatgaactagtatatggataaaggaattacagtacattcgtataatactactcagcaataacaatgaacattattactactgcttccctgttacccatagtgtacacatcttcccttataataaggaaattacggcccgaactaatctcttaacatgctactaggaaatatgcaaaaatgagcaagatggtagtattgtggtactgacaacagaggtgctagaacagattagaatacataattgaatatgtgtacgtgtaaacacacagaatatatgtatatgtaaacacacatatttgaaaattttaattcattatatcctttaaatatcctggggtggtagtagtttgcaaatgagctaagtttagttgaacatatttgagttatacgtagcttgtggaaaaattttaggaaattttccgaaacagcaattttgaactgactgctcaagcttgtattcatttttataggtagacttcagatgttttcccatgtatttgagaagttgaagtcagtaagtgaatcaaaagatattaagcatttattaattatttttctgtgccacaaagggacagaatttttagaattgctggagaaaggcagaagacaagactgtaaaggtaaatatgaaccaaattgtgaaaggactgtaggatttcatggtaggaatagattaccaacagcagagtgggagaagtaggtaagtatgggcatgatgaaggcgaccctaggcaggctaggataaaactctatgtaatcattattttatgtaactacctgaaaaaaaaaataaggctttagtttggatgcagggtggtggtatgctcttattttcaaattaaaagtaagatacagacttttactaagcagaaagatgattataatttggaagaacctgataactttcactatccgtggcagcctggtttactgtagagagcttaaaaaatcttgatgtaggtgacatccttttcttacttatcatctaaggttgtcttcctgtttacctattataactgtcccctcctgttccagtctcattcattttctagtttggtgactccttgctctgttctcacttcctccatcctccgtgtttgatccctttagatatcctttttttaagcttacttgcctgagacactttacatacacattgcacatctttttcccctaatatcttactcctttccccttttgattttggtagctactgtagttctgcctaagagataatctttttctctgggctttcaagggaatgcgcattcgactgttggtctactgtgatctttctactcccattcctgctagaggaagggatttagcactagtgacaagcatagaggctgtgataaaagtctctaatagaaagctcgttttcattacttctttctgtatatcatagtgatttaaaaatcattttaaatttaggtgtataaacaattaaaatcaccaataactcctcaagctggaagacaaaattaaaaaaaaaaagaaatcaccaatattaagtatgtaatttgatgactttgacaaatatttacatatgagaaaccactaccatattatatggaatatttaatcactgcagaatgttcccttgtgcctcataagactagaccccgtcccaccacctctggtccctggcaaccactgatttgcttttggtcactgaagttttgccttttcaagaatttaatataaaaggaacattgcagatgtttgtgtgtgtgtgtgtgtgtgtgtgtgtgtgtgtgtatgtatgtatgtgtgtgtgtacgtatttggtttctttgacttggtgtaatgaagattctttcatattgttgcatatataaataggtttgttcgttgtaattgctgagtaacattgtatggatgtaccattattcctttatccatatactagttgatacacatttgaattgtttctagttttaaacattctctgacaggtctttatgtggacatatgttttctcttaggtcaatagcttggagtagaattcttgggttgtgtggcaagtgtatgtttaacattatacacaattgccaaacttttccaaagtggctgtatcagtttacattctcactaggttacatgagaattctaggtgctccatattctcaccaacacttgatattgtgaatctttttaagtagccattttagtagattgtactggtacctgcatttcagttttaatttacatttttctaatttctaatgatgttgtacgtcttttcatgtgcttaattgagattattagatcttttataaagtgtctattaaaatattttaccaataaaaaattaggttatcttattatttatatgtaagctttctttttatattctggatataagaccttttcagataggtttgtcaaatattttagtccaatctgtggcttgcctttttatatattctcaacagtatacatttttaattttaaaatttggcaaaatatacataacaaaatttaccagtgtaaccatttttttttttttttttttttgagatggagtctcactctttcacccaggctggagtgcagtggcatgatctgggctcactgcaagctctgcctcctgggttcatgccattcttctgcctcagcctcccaagtagctgggactacaggtgtctgccagcacacctggctaattttttgtatttttttagtagagacggggtttcactgtgctagccaggatggtcttcatctcctgacctcatggtcctcctgccttggcctcccaaagtgctgggattacaggcgtgagccactgcgcccggcccccattgtaaccatttttaagtgtacagttcatcaaagcttaggagatatgtatacatttgaatattatagtatcttgattaatttatctgtcattatgaaatttctccctttaatattctaatttgtataatatgaatatagacatttcaactttcttttgattgatgtttgcatggtgtatcttttcaaccctttaattttatctcttttgtgttttcatagtaaaagtggtttttttgtatgtggcatacagttgggtcttgctttatcattcagtctgcagtgtctgcttttaaatttagttgtttagaccacttacacttaatgcaattatcattacatggttgagtttaaatatatcattttactatttgttttcctttttttccttctgcttttttccttctttactgatttatattgggtttgaggatgcttttaatgatttcattttagaccgattatggacttcctaggtgtatatctttgctaattaattaattaattaattaaatgctgtaatgtctacaatatacatctttaacgtattagtccacttatcaatatttttccgttttatgtacagtgtaagaacttcacaacaatatgcttttatttcatctctcattgtggtattgatatgcaatttacttctacatattctataaagccaacaatatgttttttaaattattactttatatattcagttatctttaaatttttagatttacccacctgtttgctatttctgggactcctaatttcttttgtgtagattcagatttcaatctgtttttgtctttcttctccctgaagaaatttcctcaatatttcttttagtacaggtctggtggcaaataattctcttaccctttgtttatctgaaaaaaaaaattcctcttcaatttttaaaggtattttctctgggcaaagaagtctatactgccatgtgttttttcctctttaagttgaaagacatatctccattatattctgttttacatggttctggcaataagcctacttttattcttattttagttcttttgtatataatgtgttctttttttctggcctaaatacaaatattctcttgtattagttttctgtaattagattatgatgcgcattagtatgatttttttatgtttgttctttctcgctattctttagcttcttgggtctctggttttatagtgttcatgaaattcagaaaattttcagccatacttttaaaataatttcttctgtatcttccctttttgggggcctccagttacacatgttttagaccacttgaaattatccattttttctcagtattttttcctctctgtactttattttgaatagttatactattgctgtttttttaacttcatgatcttccacagtgtttaatatgctgttaatctcatcttttatgttttttgtttcaaagttctcctctgtaagtttcatttgaaacttttttatatcttccatgcctctcatcatcatgaccttttctctgctttcttaaaagttataaagcatatttataatagctgcttttatgtccgctgattctctccatctctctcatttctgtgtctgtttctatcaagtgatttttctcctggttatgcgttatagttttctgattctttatatgactgttatttctttattagatctcaggcattttgaattgttttttgttgattgctgaattttgttgttttaaatagttttgtattttgttctgactctttgttatgtcactagcaatcagttggattattttgaggcttacttttaagatttgttagcatggctccagagcagccttttgtttaggtctaatacagccccactactaaggagataccctcctgaggattcagctgaatgctccatatattactaggtttatccactctgactgataggaatacaaattcttgccagctatgtgtgaactccagataatctgttcactcacttttgttgttcttttcctgtccttgggtaattttctcccacgtttatgtaggttagaactcagtttaagacttgagaagacctttctttctctggagctctatttctcagatgcttggacttgtaaattttagctgctttgtgaactcttaactctgcccctttagctcagtgagaggtcagttttacttggcttcccccaccatactctttggcctggaaactgactccagtttgtaagtttgggagttataactttgtttcgtttcttttgggaatcacaattttgtgctgttgtccagtacttgaacatcattatttcatcttgtacatcctttgttcagttttctagttgctttttctcatctattgttcatttttctagttgcttagaaactagaggttaaatctggtctctgtgtttccactttggttggaagttaaatgctatctgtatactgtaattcatatttccttccaacctttatcataattttactttgaagtaaccacagtgtagaaccacaggggtggcggtggtggtggtggtgctggtgctggtgagatgtctgtgagtaagctattggtgatatgtaggaagtatatgttttaatttttcatttactctgttcatcttttatgatactttataaagtaaatcttgtcaccctgtctataaatctttgcataaaatgtatacactagggatatgtactatattttttggtagttcctatattttagacttctcacttcctatttttactaagccttgaaaaaccaggcatttcttacttctgtatccataataaatcatggtattcagctgctacttagaatacagttgttttaccatagaatgaattttggtgtacaaattttatgtttggttagttagagatcctcagtatagttatagaatttcccttttcgttttctgaaatggatctaatttggtcattttttaaatctgtattctttctgagtaggtgacaatcctagggcttttcatccttggcattattatccttttcgttgtgttggaactatataagatagctacaactgcacttgggtggctcttagtactttggtctttttaggatttatatatgtggtaacaaataccaccagtaatatcatctctaaaggttgaagactatagatacatagaatttaaaattgtttcttttgtgaactcatctatttttccattcttcttatttcttctggaaattatatgtgttctttaagggtatgcagggtctgacaaggtgagcttcgccagcctatccaagggtgaagtcagcaccttacataaaaccaaagtagagggggaaaaaacctagtcaattttagtggcaatatggcaggaaattgaaagtgtgatgaagcctgtgtttgcacataaaggtgaacttgcagctcttgcatgtttctgggttttatggtgttcttatctctcgtagggacaatataagccatggttaaagataatcctttacttatttacttaaaggagtaggtggacagttggtgatgctgagggtcaaggtaaactttctgttttctgttaacatatctagtacctgtctgatatttccatatgtaaatgagtttctttgtcatctttgcattatactctaggcaatgctacatgctagcctgactgtggtttcatttggcttcctttttctgagtctctatacctgttcagtgtacttagcttctagcgttctggtgcaactacctggcactcatttcttgctttctccttttgactgtctcttaaacaatattgtctcctgtatatttcttcctttctcttttgaaacttacctcaatattttatatctgatgtaatatctcactaggctattattatgtaatttgataaattgagtaattgtaatgtattagtgatgctgctactgatgcaaaatcagttttaggaggtgttaacttatactattgtagcgttaagcacttttgagttagatttaatttaattcattttatcttcagagccaatttttaagctttatctagagtcttactgtgaggaaaagaaatgtcttcttaaaagaagtaggcttttaaaactgtaagattctccttggagaaaattatttctcttgaaactcaggccattggaggtatgtttgcagtgtttccttggtagttctaaatcaggtattttcatggatagtctgcttgtctcagaaagcctaaagcggagtcttttacttggggaatgcttaagtgctccacaaatcagtgaccagaatcgtttcattttgtgcccatgtggtttctgtgggtggttggttgttttaaaaactgtttcaaagaagtacattttttttcctggcaatacatgtgtatcctgtgtaagtatttttcattattaataattttgagaaaaaccaactccaggtcataatgcagttggcttaagtcatggggttttatccagagtcatcccatatgattttgggtctgctttaccaacaatttattaagctgaggttcccaaagggcatgtttctactgtcatcaacctatttttggaaattatttttgtccattttgtgtaaatcaatagtttttaagagaaactcatgagacttttaggcttaatttcttctaggcttatatactggtataggggggagtatttcctccctttttctttctctctgtatagaaatttccatttctgtttgtgacttgtttgtgattccagctttttcattgtgctttgattttcatcttcttcctcatttaggcttagtggttagaaatcttgtctttaattgaatctcaaagtggttaagtttttgtcattttgcgttttcctgtccaacagggagggtttgcatctgtaggtacactgaaatctttaataatgaacttgggtttaaagagaaattgaattaaattcttgagttatttcagaagttgtaacatcatgctattcacatttctggccacagtgaaagtttttgtgaaagtgaagttttgtaggaaaaagcttaatgtgtcaacagcccatagtcttggagtggatctttaggaattggctagcgcagaattacaacggtaaataatctgtgtaaattttctagctaacaagtgaatattatttttaattaggaaataaccaggaataagacttgagagatcatctctcctaacttacttatttaagaaaggaggaaattggaccctagatattaggtgaccatcttcaaaaatggtgtaatttagttgaagaattaggactagagccccatgccctgatgccaagtttagtgctctttccactaccttgggatctcttctcatcctattccaacaaaataagagtttaaagtgtaagatacaagattctgctttgaaaatatccaaatacattgtatttttgcaatataaaattggagtgatgagagaaaacttataaattcttgtgccattttcccccttgatctgtgaaacagtactgatagtatctgaggttgtcatttggttattttaggaaggaaattgtatggcccttattttgtttgaatctcttcttcatcatattaaggtaatttttaaaagttcttgagctagaaaaacatgcaaataagaacctcctgtattggctgctgttgactgcctatttagcattaccccttttcccactacccccttttttttttgagacagagtttcactctttttgcccaggctggagtgcagtggcatgatctcggctcactgcaacctccgcctcctgggttcaagtgattctccagcctcagcctccggagtagagtggcttggattacaggcacctgctactacacctggctaatttttgtatttttagtagagatggggttttgccatgttggccaggctggtctcgaactcctgacatcaggtgatccggccttccttggcctctcaaagtgcagggattacagatgtgaaccaccacgcccagcctcccactacctttctaacagatcctttgttttgtttaggcttctaaccctcctttatgtgactcagagaaaggagacctcattccaagttccaggattaattctggtaagtctaagtgaaacatagtaattccttttctttgctggcagcaggtttaaggatgggcagatcacaatctcaaaatatttttgtcatcttgcttccagcctgttggtgaagctaaatataggaggccagagccaagggaattagaatttctgaagctctgacttgcagtatttaaagactgctctaccttgggccttcttgttatgtgagatactagttatacatctccttattgatttaaccagttttattttggaattttctgttacttccagatgaaagtattctgtctcatgcatctaatactttacttgtgaatgaagattcattatgaggtaggtttttggcgattaaatggttgtgactggaacagggaagactattaatagattggaaactaggagaatcttttatgagatttttaactgggtgaataacaaagtcgtggttcatatccttgtagctccacctcgtttcttttcccagtgacgtcttaaattctgtggattctatttgttccttatcctctttgacctctatgacatatgttagatctgtctatatctttctgtatttctggtcataccttttaaattttatttactgacctattttcctctgcttatctcttgaatagtaatggttttctgtggttttattcttggcctacttagaaatataaacattattatttagaacagttttatctttatagaaaattatgacaataatatagagagttctcagaaacctcataccttttattaacattttacattattgtacatttgtttaaatgaatggccaatatttatacataattattaactaaagtccattctgtattaatattccctttatttttatctactgccctttttctgttccaggttactgtctaggttatcatacatttagtggtcatatctccttaggctgctcttggctgtgacagtttcttaaactttacttgtttttgatgaccttcacagttttaaggagtattggtcagacatttcctggctgtgatggtttcttaaactttacttggttttgatgaccttgacagttttgaggagtattggtcagacattttgtaggttattcctcagctgagattgatatgatgtttttcctcatgattagactggggttagggtttttaggaggaagagcatagaggtgaagtgccatttttatcacattgtatcaagggtacttactatcaacttatcattgttaagctgtgacttattgtgacttatcattgttgatgtttactttgatcatttggctaaggtggtttttattaggcttcttcactggaaagttattctttttctcttattctgtattgtactctttgcaacaaagtcactatgtgcagaccacacttgatggggagttattttccaccttcttgatagtgaagtagctacatagatttttttggaattcttctgcatggatgatgaccatggatatttattttctacttggcttggccagttttaaaattgttgatgtatgttggtgatttctaaatatgtttatcctagcgattctttctacctctttttttgaactctttctctttctagtcaacttcctattagaccttttccttttggtctttcttttattgaaacctcgaactcaaatgtgtccatattgtctaagcccaaactaattattctacacctcatctacttcattttatgcctttttgtacccaaacttgctttttcttcccacttactgaaggtagaaaccgatgggatcctttagttttccttttccttattcacactcccttattacctcttactttggattattagtttattgcatagatttccctcaaactagcctattctactttcacactgttatctacattgccttatagccatttttttctattatgcatgtcacttattcaaaatacatcttatttctgttttcagaattcttcaatgagttctgtgtttgcctctaactgattttaggtaaattacttgatctcactatagcattgttttcttattgaaaaagaggaggtgatatagaaattttctaaggattaaaagtgatagcgtgtctaaagagtttaggagtgtgtctggaacaaagtagtacactctaaaagacagttatttttattgttctttgcctccttccaaactccttatcatgacttttcataattttgcttctagccacctatctagtaacttcatttgtagttattctcccaccataggtaccttatcattcaataattccgcattatttgtggtatttttggtttgccatactatgtgctttataaacctgtccttttggctatgtctttgccaggaatgtgcttatcttttttgacgaacaggaaaactggcttttacttattcatagtatttaacttagatatcctcacccatgaagagtaaattactatctttctcagttgttgcatagatatattgtgtactatatatacgtttgcaagtctgtctttctattaaactgtgatatccaaggacataaggacttaatttaattcattgtatgattcctagcacttagtattttcactctgttaacatttgttgcatagattacctcacgaatacagaattcttatcgatggtaaccaggcttctgcttgaacccttctaatagtgggaaatttatagttggagagccagtgattacttgtggacagacctaaattttagaaagttattttcatacaggtttgaaatctgcctacctttaactttcatttgtctgttctctggacccataaagagttagtctctgcattcagcattttcaagtatttgggtaccaagtatgtgttaagcacatttcagaagtctcttggttggaaatgaaagaaagctgaaacatgttaggttaaaagaaataaatttgctctttaactttgattgtctccagactttttgattgttcacctctaccaagaatacatttttgaggatacatcctcagtgtgggtatatttatctgtacattttgtacatatatgattataacaatacattatgtacattataaaacacagagtatggcacttttcaaaggatagtacaacataaaagtatcttattttatgtattgtagtcttttcttcttacattctggtggattgtcttacacatccctcttctcagggaggtgtatacataccattttaaaggccacctatatatgtaatcaaactgtattatgggcagtgttggagctggtcttagagatgactgtagatagctctgggggttctacttttttcattgctgctgctgctttttttttttttaaatggctttactctttcagactggcttctttctggagctaggatcatggctgctgctggctttgggctaatttcttcatagcttttattgatttattcaacaaattatgaatggagtgcatatcctgagccagatactattctaggtgttagaaatacagcagagagcataaaaaagaagaatattaaagtggtaagtgctatgcagagaattaaaatagagtgatgtgacagtaattaagtgactactttaggaaagcctttgtctagaagagacattaaagctgagatacgaatcagaagaaatagctagccatgtaaacatcaggaggaagagcattccagggactggctaaggcaagatttctaaaatgggactgaacttttgcatgtttgaggaagtaagagaaggcagttgagtttagaacttagtagaaaaggagagttttgtgatcagagagaaacagagcttttcttcttccatctctagttggaaacatcccagggaaggactctgatggatccagcttgagtcagtttcctatccctaagactgattattaatgatggggacatattttggtttttttagctcacgttggactaattgtctgtgtttgtggctagaagaaggtttggaggaagggttttgggttgacaaaattaagagatgctacttattatggaccttgtgagccaagagcttttcattatatcagctaagagttctgtcttaccctatttgaagatacctgttctttatctttgttgactttttatcaaggctaaacttttcattattcattcttctcagaaatgattctttaaccacaagtattactttaacattgcattgtacttctgagggtgagagatggaaagagaagatggaaatctcagtgtattttgggaatatatcctttccattcccttaatgtccatttatgtataaaggatatgtgtaatctggggtcattctgtacttcattgcctaaggcagggaaattggccaatgtatttttgatagtgcttcttaaattaagttgaaaactcaatcctccatatattctgggtaagcaagttttggggggcatatttttgcttcttggcttttggtagtattaaaagctttgataactttggtagtgatgtttgcatggtttgaattatgtgcagcagtgagtggacataatattaaatagtggtatttactagtaggagcaaaactgagtactaaatttcaatgtttctgaaatggtgtggttgcaataggtcaatagctacatgcatatttcttgaagtcactggaaataggtgcctacacagaagcatgaggctaatttctacaaataattgaatatgagatatactgttattaaactgtaataattatgtatttgattttttttaaagaaattatgctttttgttttttggagacagggtctgggtctatcacccaggctggagtgcagtggtgtgatcatggctcactgcagcctccaccttctggactcaagtgatcctcctgcaacagcatccaagtaactgggactacaggtgtgtactaccaggcccagctacattttgtatttttttgtagtgatggggtttcaccatattgcccaggctggtctcgaactcctggactcaagtgatctgcctgcctccacatcccaaagtgctgggattataggcatgagccactgtacctggcctttatgccattatttaatttacagtgttcaagctaggttagcttttacattataaagccagatctcttacattagagtatcaaggtgagccttctgtgtttgagtgtttaatttagatgtgaaatgtttgataggacactatactagaggctctaagaaatagagctctgtggtgaatttcttttctttactattacagatttctaatgatacttttctatgttgtaattttgggtttgtacatgtgggttgtgagaaataaactggaaatcctgtctctgtgggttggaatctggtgtggcttcaaaaggcaaacaaaatattctagcatttacatgccaggtaaattttttaaatggactttccataggttccaaacttctggggccaaataatataaagtaatattgtagttgcagacagacttctgttggcatacatttggtttcttaatttatgatgggacatcaatagctgattaagcaaacaactaaagaaatatctttgtacatccttagtacagcttgttcctgttcatttgtgacaagttgtttgggaaagagttttgagatggcatgctaagacttgatttcctaaaagtctagtgggttttctttgtattttaaaagtgaagagtgtatttcaggattgagaattttctgctttttataaaagactttataattgggtaattttagatttttaactgtacttaaatgaagatgcacatgtttttaccccctcctttcttctattaataatttattagataattttaagaaaggaatattgtagtattatggtggccagatttagaaaggtctaggtgaatttactgtctttcagttcactttattcttgtttatatgagtggctggagatatcacatataatttgaagtttacatctggttttatgttaagtgaatctgattcaggcacagctatcttcaatggtgattttcccagctgtaaattaggaacttggcattgaacactatgtggttttgtgtaagcagaatttagattgtgatattttctgtcgcttcataattctaattttagactttcaaagtaggataattcactccagaaagtctgaaatctgtgattttccatacactgccaggtacattgatgtcagtggtttgaatcaaactgaatatcctttataaaaaatatggtggatcattttatatatctacctgtagaattgtgaccatgggttttctgtttttttatttataaaaatgtaggagattctttttatttgcatttgaaaatttcttggaaacacataatacagtgatatttatggaattttcctgcagtggtagtaaatgtgaagagtgagggataagtttagagcacaagcctcttactggtcttttgctttacttaaaaattttttttttcacttttctaattacttgtctgaattgcacagggtttcagtttgaatattgcaggtaccatgaagtcttttcttgtagctattatgtacttgtgtgatgccatcaactagattataagtgccttgagcataggggttactataaattcatctttgtattctattgtacttagcttctcacataacaactaatataggataagtataatgagtttgttgaattaaattagattgatctgaattagaggggaggaattagacaatagaaaaacagggatgaacttagagaagctaagttttgtggtcatttgagataccttgttaatttagttttaagtaatcaagagtggtgatgttttattcatctttaaaactgttatgactgaacggtcagaaatgatggtatgtcttgttctgttaccaactagcaatttatgtttcagtaaactgctctatgtgataattcttgtgttaaaaataccattactcaaaaattagctgggcgtgttggtgcatgcctgtaatcccagctactcagaaggctgaggcaggagaatcacttgaacccaggaggcagaggttgcagtgagctgagattgcactccagcctgggcaacagagcaagactctatctccaaaaaaaaaaaaaaaaaaatatcattactggtttttgtttcaggggatacatctcatgaattaactgatttcctaagtcttttttttccccaaccctccattaaaaaaattaatgtgtaatttacatatatcacaaaatgtacagatagagggtgtatcgtgtgctgagttctgataaatatatacctgtgtaacaatactccagtcaagatacaaacatttcgatctcctcagagaattccctcattccccttgtagtctatctttctccataccattctcccccaacccctggtgtctactcttctgatttctgttacatatattagttttgcctattcttgaacttcatatagatgaaattttataacatgtattctctattactggcttaatttatccaacatgtttttgatatttattatatttgtgaagcctttttgaatagtgtagtgaaaaatgttagagaacatctccttgttattggtgagaaaatttctgtgaatgttaatatttaattcagagattaaagaagaatctatgtaaagtgacaatacctacaatatccttttttgacccaaataggaagtagttcttttgatactttgaatattgaatattggaatagctttgtgaatacaaggtccagtttaatctggaaattaaaatcttcatttatttattttgttagcataagtcaattttgtcctaattattgaaccctgacttctctgagaagatcatctttcaggtttgggaggaagaaactctattcttacttagtttttaaactcacattttttttttcgtattgttagataaggttatatagacatgagcctctgttactttaacagtgcttttgaaacagctaacagttcattctgggatataagtcaaatatgtattgcttaactcttggtatcatctttattttttcaaaattgtaaaataccggtaaaattgatcatctttaccattttaaagtgtacagttcagtggcattaagtaaattacattgttgtgctgccatcactatcatgcatccacagaactcatcttgcaaaatggaaacttcatcattatttcttaatttaaaaagcatttttcaaaaagggattataatattagctcctttatccatttaaattggtcccataattaagtttataaaaatatttttggctaaaatggatagtcatgaaaatgatatgtacatgctttataacatatttgtagtgtagccttttggtattagacccaaatcttttctatgaacacaggtctccttattggaatttattgtaaatttttcttaaatcacacctttaaatatcctctttaatttctaagtgtagtgagacagttgcaaaatagtctcagtggagattgtcctaaatttttatagtcttgtacttgacagaatttttttaaaaagcaagtggtccttatcaaactgttacaaatagtcaactttttcatggaaacaactacttctgctgctatcttacagatttttaaagatatttagtgaaattatacattaatagacataacccagataaaaatgtttggaaacaaaaataactgtttcttgatagtatacagttcagctaatgggagcatgagtgctaggtcttgtcttattaaccactaccccttccttcacactgtgagaatcaaaggtaatggagagcattggttaacatcatgacacatgaatttgttatgtggcagataatgcaaagaacttgtagcatggatagtaagttgataatttgaaagttttttttttttttaaagtttcagtatcttacagctaccaattgtcagtcttcttttctattgttataaatagggagtttgttcatactgtaaaataaaattacagtttttgtttgttatttattgctgtttaacaagctaccccaaacttagcagcttaaacaactgtgtcaatttgctcatgattttgtgagtcaggaatttgagaatgattttgctggtctttgcataactggcagagtgcaagtttgattaggtgttttctgtcttcatgtgctctctccacatggctagtttgggcttctttacagcatggtagtctcagcatagtcaaatttcttatatggagggtcgttttctccagagttaagtattcataagacaggaagtggaaggtgcctatttcttaaggcctgggcccagaaaatggcacatatctcacccatgctactggtcaaagataccacaaagctcacccacattcaaggggaggagacatagactgcttctctgtagaaggcacaccaaataatttgtggccttttaaaatctgccaaaggtttaaatggtgtatataattaatggcattcttatttttaaaatcctgagaatatttctggtggatgtcaatgttaaagactatggaggaacacataggtctacatttaactgattcaaattataaatgagtatgaaacaactagagagagtaaaactgacaaaggatagaatgctgggcacaacttcattataataaggactactgtaaagtttctatttattaatccaactcttgttctcccaccattaggtttcagttaatgccgcatagcattaaaaaaaaaaaaaagacgaggaaaatgaagctcagtaatgtgtatagatgaatttgagttacaatcttctggcatgctgcaaatcccatttggattcctggtaacagacattttagactacagtatgagataattttgttgagtggactaggtctgagtatcatgtttgagaaggcagcatttaaaatgaatttgacatttataagtatttttttttttggtacttaagctgtgcgtagtgttatttttgtgtatgaggaggtaaattttaccttggattgttaaatatagtgtcttatatcatctgtaatcataaaggacagattttctcagtaacattttgtcagtgacacaatttttcatgaccagtgaatgctagctgaagaaactgaaaattttctgaaattgtcagtataaatcatttatttcagtagaccttgctatgctttgctgttggaagtaaatataacttttcctaagattagtcaaaattcactgagtttgtgtcatgctttgttagatgctgagaatagatcaaagtttgatctctatattttatttaattgatatcaaatgaacataattaatgatgatgttgaattttttttaatacaagtatgaaaatgccctttctctttgtgattgtttggtactagtcattaactttgttcccattttgtataaatattatgtattagaagttagaggcagttttctgtgaagagtatttctacttgattttatgttatttgataaatagatgttttgaatagcagcataaaattaaatgtataaatttaatattattgctgtattgtaatctttttctgtttaattttttggcttgcattattttagtcgagtaaagtattttgtatctgttatttttatggtaatatatcttttcttcatataaaataaaatttgagacctctgcatccaaaatactaaatataaaagtttataaattatattaaaatatgtctcagattatatagagtgatgcgtagtcattgttaccttcaaattagccacttggtgaaatatgtcactttttagtcgctagactatgtttgaaagctgtaaaatactggcgagccacaatttaggaccacgtaaaatgtgaaaatcaggtttatggaaacagattagaatttattttcattatggaatgttttgtttcaaagtttgttgaaaaaatatattttgatgtataataaaggtatatagtatgatgtttgtgagattatttttcaatagtttaaaaatacttttttattttatgtaacaatataatggtacatttcaagtaaaaaatttgttcaaatctctatctcccttacaaagctaatgattttatgtccccctttaatctgttttatttgaatatagtagggactctttttagagacttcttttatagaaaattgtaggtagaagtgtatacaagtaaggtagtgtatgctaatgaaaatggaaaatagatcactaaaattttgtttgtgtatctcatattatattgtaagtgatttaattattttctttgattttcatgcaactctaaatatatccctcactaatagttatgtttaatttctcccatccatttatgttaatacatacatacatgtgtattacacatacacacacacacacacacacacacacacacattttttaaaaaaagttgttgtaggcagaataatgtccttcaaagatattaggtcttaggaacctgtaagtgttaccttgtgtggaaaagggtttttgaagatatggttaagttaagggtcttgagatggagagattattctagattatctgtgcgggtcctaaatactatcacaagtgtcctcataagagataaacagaggcataatctacagacatacagcagagaagacagtgtgaagatagagtagaaagagatttgaagatactagccttgaacattagagtgatgaggctacaaaccaaggaataccagcagctatcagaagctggaacaggcagggcatggattctcccctagagcctccagagggagccagccttcccaactctttgatttcagcccagtttgaacttctggcctccagaattgtgagagaataaatatctgttgttttcagccaccaagttttggtaatttgtgacagcagccacaggaaactattatgtgtgaatatacatttttgaaatcactgaaatatttaatcatagaataggaagggatccccgtcttaattgaccggctcctctcttcctttgacttgaacatattcacatgtggacttctctactctttttactattattacatccttatacattgggtcacagctttaatatcagctccacagatgagccctcttttactaattaattcttaattttttccctatatcaatcccttttttgttttctgtatcattcatcatgtacattcttggggcgaggaaaatcttaacccccattgtaagtctacaacctataaagaaagatatatttgtatgaaacttaacacatgaatggaaagatataccacacaaacaattggtaaaaatatgtacagtgcagagaaaggacagagttgatatctgttctatataataacttcttagataatgacaaaaaggaaacaaacagcactatatgaaaatgagcaaaagatatgaagaagccagtccaaatggccaacaacatattaaaagatgttctaacttactagtgtgatatataaccttgtatctatcatactgcctccttcagcccccacctttaatgaaaagaaagagaaagagagaaaagaaccagcaataacattgtattggcaagaacctaaggaaagaattagtttttatattttgctggtagaaatgtgagttactagagcctttgtagacagtgatctgataatatctattaaaattaaaaaaatatatttataccagttgaccgtgcagtcttactctttgaaatctagctcatagaaacacacttccatatataagcatttctgtatgagcatttgtttctagtggcaaaaactggaaatgcaatttatgtctatcagtaggggaattgtgaatgtatttattatgtatctacataatatatctacataatagaatcttagtagtcattaaaaagaatgaatcagatatgcaccagtaaacttggtgggatttgcatggggaattattacatgagaacaactaagataattaaaaatgtgtgtggcagccaggcacagtggctcatgcctgtaatcccagcactttgggaggtcaagatgggcagatcacctgaggtcagaagttcgagatcatcctggccaaaatggtgaaaccccatctctacaaaagtacaaagattagctgggcatgatggtgggtatctgtaatcccagctactcgggaaggctggggtgggagaattgcttgaacccaggaggcggaggttgcagtgagctgagatcacaccattgcactccagcctgggtgacagagcgagactctgtctcggaaaaaaaaaaaaaatatatgtggcatcttaaattaaaaaatgtagtgataacaccattatatatgtagacatatatatgagaatacatatttttatatgtatgagaatagaggtatatagtagatggttaacttggaccattttaatgggcaaatgggtggagctgtcatgttgtgggagggaagttggagagggtatttgaggtagggaaacatgactactaatttatgctttaaagttaaaattaacatttatgtgtttatgtataaagattttttaaaaattgcatgtgatggcattaattagtatagctcctgtggaaagtgatgcagtaaaccctgtcaagcagtgttcatactctttgagctaatcattctatatctgggagttcatattaaggtattaaattaaaagaagaaaaatgttaatgtgtgaagtcatcattgtgctattaactatgtaatatggaatattatatgctaggaaatataataaagtgtatccaacataaactcatgctgaaacttcctctttttggactttacatccagaaaaattgttgtcatattgatgggatgttacacacaggtaaataatacaattatgaagggtacaatgataaaggctgttacttagaactatagactatataataaatgaaaaagaacttataattgcatgtagaattaaaatatatatgtatttatttgagtactagaaggagataagataaaatgaaaacagtgtggggggattatagtaaattgtttttatcttgttttgacaaatctggagaacagtgttgctcaaatattagcaaaatttagaagaaacactaaaatttaatatccagctcttgtaactgtggaatatattttctttataataaaacaattttgtaattttgcataggcattggcagaatgtttaaatttggaatcagattggtatttctgtcaatacttactctgaaagctgcagtgtcatcatgagttattaaagataaatctttggtttcatgtgccatatttcttactaggagtaaaactaggtctaagtccattttacgctttctaatagtttccttttatctgttgattccctcttatgcatgttttctaccgttttcactgtattcttgtattaatcacagtttttaaaaagtttttgtcttaatgctttaacgaatagattatctcttggtctagttttattgattacttcttgacttttttttcctttttgtttatctcacaatttttgtcacccactgtaaaaaactgagataaattatatttattctctgaaatgggaacacctattcttctgtcaggtcattggtttgtgtttctaaaatatactaaactaatgtgttatgaagctaaggcagataggtgataaatttgtaaagcaattgaaggaaaaactcagtaagtcaaaacacattttaaaagagacacgtttaaagttttttttatataaatggaatcgtgcattatgtgaccttttgggattggcttttttttttcactcagtgtaatacctttgaaatctctccaacttgcatgtatcggtagttctttcctttttatagctgataagtattacagtggtagagatgtggcacagtttgtttaaccattcacctattttaggacattttggttgtttccagtttttggctattacaaacaaagctatgaacaatcatgtactgatttttgtgtggacataagttttcattttcctgggataaatacctaggagtacaattgcttgcccttataggaggtatatatttaattcttaaagaaactgaacaactgttttcccaagtgatcatactgttttacattcccaccagaaaaagtggatctttcaaaccacaaatgtttgaaagagccactttctccacatccttgccagcatttggtattgtcattactttttatttttgctagtctggtaggtatgtggtggtgtctcattgtggccttaatttccatttctctaaagattggtgatgtttaacatctttttatttgcttagttgctatcccctttgtatatcttctttggtgaatgtctctatcttttgtctattgaaaagaacatgctttcttttcatatgtgcatggaaccttcaccagaataaaccatatccttggtcataaaacaaatttcagtaaattgagaagcatttcctgttcttttttcctgaaaaagtttgtgtagaatttgtgtactctctactgactcctggtatttgtctggtttcagagggtgggagggttttctgcctttcccccaagtggcagcttgcagttttgctttgtatgaagaatagttctaggatatgagtagctaatcatttccttcattcctgtaccataagaaaaactctctcaggtaatctaatctgtcctcatctttctctagagttctcgatgcgcatttgggttgtttgtggggtttactattgcaaacagtgttaccatgaatattcttgtgcaagacttttggtatccgtgtgtgagagtttctctagggcatgttactagaagaggaatttctcaaagtatacctgtgttcttgcggggcgtggtggctcacacctgtaatcccagcacttgggaggctgaggcaggcagatcacctgaggtcaggagttcaaaatcagcctggccaacatggcaaaaccctgtctctactaaaattacaaaaattagctgagtgtggtggtgggcacctgtaatcccagctacttgggaggttgaggcaggagaattgctggaatccaggaggcggaggttgcagtgtgctgatatagcgccattacactccagcgtgggcgacagaccgagactccttctcaaaaaaaaaaaaaaaaaaaaacgaaacaaaaaaaactcatattaggactgatcaccttgttatcatataaagttgttataatatactgtcatattaaatatactgtcatatttttcttctaattttgtcttgaggtctctcaagtggctgtaaactctagccctgccctgagggggtgccaggggatttggtcatatgatgcttataatgggcctttcacaggatacttctttatccctgtggacagcctaagtgtttgacatgtgacccagatgtccttctcattacaaacaaagaagcttgtttatactggcaggtgcccttttggcgcttgcctgacttgtgtccagtttattcttaacaagttagctattctgtaggagagccctgaccaggaaaggagttagatttagatgtgttggtcaggtgagacacagaggaggcagcacaaccaaacataggaaataacagaagcagtatattacttacggatcccacagaaaagagggcagcatgtttctcagggccagatgggaaaggggaagccatctgggacttggaggctccaccagtgggtggggagagagagagagagaaagagagggagagagcaaggaacctgtgagtcaaagccattattggggtctaggttgttatcaaagagtttccctgcagggaattctaactgtgggtgacgtggtttggatctgtgttctcacccaaatctcaggtcaaattgtaatccccagtgctggaggtagggcctggtgggaggtgcttggatcatggggacagttcctcacgaatggtttagcaccatcccctctgtgtggtgctgttcttgtgataaggagtgaagttatcctgagatctggtttaaaagtgtgtagcgcctgcccccctcttgctcctacttctgacatgtaagaggtgtctgcttcccctctgccttctgtcatgattgaaagtttcctgaggcttccccagaaggcaagcagatgccaacattgtttcctgtacaatcctgtacaacctgcagaaccgtgggccaattaaaccccatttctttataaattactcaggctcaggtatttctttaaagcaatgtgagaacggactaatacagtgggtttacagcaaacagacttcatttccttggtcacgctgtgactgagagatggtcactgcagcttatctgggcagtccgtgcagggtatgggagtcagtagggtgagtcaagtaggttgtatccagctgtcccatagggaagtggttactgggaggcgatcgtataaggtagatatctggaacaacaacatagaggaactgggtggaggcagacaactggaaactgtgtcgagtgtgactaagcccagtttctgatatgagaaagttaaacatgtttaaaatgtatgccaaggcaacataaaattattagaattcactacattcaccaaaaatatataacatcaaataggtagcaaaatttgatagattggtatacgtaaattagtacctctactattaaagtgggaaattttaaattaacatttgtggttattggtagataaaaaagtcagcaaagggtatacaatatatgaagaatacagttcatggacatatacagaattcaatatataaagaatgaaaaagagatatataacataaatcagagattaaaaggaaaatgagaatactgttaattatatgtgacctatgtaaaaatagacatttctaggaaaatattacttgtaaaaaccgagggagaaattaaaagtctgaatcttcccacaaagaaagcaacaagcccaagtgatttgccaataaataagtctctaccaaaattttgagaaatagattattccaatctgttgcaatcttttaaaattaatacaaacagaggataattccccagcaagttctgaaagcccagcataatcctgacatccaaatcaaatgaagacaccaaaacagatgacaattacagatgtatttcacttttaatatagagctggtaatcccaaacaggacagtagcaaattgaaaccaacatttaaagaagacaaacatcattgccaaattggatttttcccaggtatgcaaggatgatttactaataaatgatccataaatgtaagcaacatttacattgatagattaaaagtgaaaaactgtataattaaaatagatacagaaaatcatttgataatcagcataaattcatgataagaatgcttagcaaattaagaaaagagggaacatctctaaactgtcaagaaatatttaaaaaacaaccagtcaaccaaccatcatcagcaatcttcctaaatggggatagatgaaaagattctcttaaagtcagaaatgataaaagcatgcttatcacatgttctgattattattgctgtataacaaatccaaatttaatggcacaaaacagctgttttattatgcttatgaattctgagggtcagaaacttggacaatgtagaagaaggcttttttttttttttttttttttttttttttttacagctctactcttttcagtgcctcagttgggatgatgtgaacgttgaacactggaggtgacttgctggctaggggctggattcatcttaaagtatcttcatttatatgtctggtgatatgatgctggctgttggctgggaacttaattaggcagtcagttggaaaacttacatacggcttttccatgtgatatctcagtgtgggccagtttggtctgtctcacataatgacatctaggctccaagagcaagcaatacaagagcaaaagacagaagcacattgcagtgagctgagattgcgccattgcactccagcatgggcaacaagagggaaactctgtctcaaaaaaaaaaaagaaataagagtttactaaagttgagtaggtagattaatatagaagtcaattggattgttattatagtaacaacaaataactagaaagtataaaagaagacattgaaatagtatcatagatactatcataggtgcattcctatttattgaatgcacctaacaagaaatttttgagacatctttaggggtatttatagaatgttatcagtagtccttttagaaaaaacttaaccatggtatatcttagttgtagggctcactcactatcataaagattccttttctgctgaaataatcttatagctagaaacagacccacagtgtttatgggtctgtttatactagaataaatttggtgtatgataaagatggcttatcagattagcaaggaaagaagttattgtataataaatgtaatcaggaaaaatgatccatatcaggaaaaaaaaagaattagatctctgcttctaccatataaatactcaaatacagatggctgaaatacttaaatgtcaaaaataaaatttccttgtagtaaataaaggtatataccttttatagatggcaaaggatttaaaaaataagactaagcaactgataaattgttattaaagaatagattaagaatttctgttcatcaaaagctgccttaaataaagtggaaacacatgttataaactagaagatgtttgcaatatacacagctgacaaatgattaatatcaagaattattttaaaaaatttatccaattaaaaacacaacacagtcaaaaaataaagatgtgaataggcatttcacaaaggaggaaccacatatcattgataatcatatgaagaaattttaacttcattaatgatcagggaagtcaaattaagtacaaaatgagatgccatttaaaaccaagtgtcaggaaggatgaagatttatgggacctctgtattcatgccaccattttggaaagtactttttcattttcctgtgaaactaaacatagacaaatgttacaacccaattattttactcataggcatatactcaagggaagttctgtgtataaacaaaagtagatgtattgaaaaatgttcacagcatttctggtctcaataacaaaatcctgtaaactacccagatgtctcttgataggaaagtggctgaataaactttggcatataattaatatagcagccaaaagaatgaataatagccataataatattagcaacataatatcataagaaaaagttaggtcccccaaattgacatactgcaggataccctttaaaaatagttcagataaaagtaatatgctttttggtagtaaatatagaagagatgaaacatcattcatttgaaagtaagggaatgatgaaaaaataaattaaggattgtgagtccagataagcacagggaagagttatatgtattacaacttactgtcagggtcttcaggtttatgttgtcaacactgattttaccgtgattactatgtgacacttttctctattatttgttgtatagagcacattcttgtgccttgatattgtgatatatttgtagacttttttttacaggacctatttttacttttaatcattagtaccaatgcaaatcacaattttgtcatcatgcttattttgcttatatgggggactccaaagatcatatcccatagaggcatggatttggcattcttgttttgaaagatttggagttgagattgacatgatagttttagggtctaaaacatgattgttttagaaatagttatacagtataatgaaaggattggagagcagaatgacaagaagtaagttctggtagttttcaagaaatagtgatagagatccaagccacaaagatggtcactagaggagacaagaaaggatgagtggggaaataatatagaattaactgacttacctgctgtggtgtaaagtgtcaagtgaaaagtaaaaggtgacacctgggttttgcatcctggatggattaaagaaggataatactattgactgaaaagaacagattgaggagagaaagtagtttgtgaagaaaaggtgaatttggctatagtaatagtgtagtttcatatatttagagtatcttagagtgtaataccttagaagtcctctgatcagcctgttcatttgacatatgaggacactgtggcccagagaaagcgtagtgatttggccagcatcatatggttcaaacacaaatttctgtgtgattacaggatatggatctgatggagatgaggatgatagaagcaactaggttacaaaggtccattaattcttgttaggaatttttactttgggctgggcgtggtggctcacgcctgtaatcccagcactttgggaggccgaggccggtggatcatgaggtcaggagattgagaccatcctggctaacatggtgaaaccccgcctctactaaaaatacaaaaaattagctgggcatggtggagggcgcctgtagtctcagctacttgggaggctaagccaggagaatggcgtgaacccgggaggcggagcttgcagttagccgagaccgggccactgcactccagcctgggtgagagaccaagactccgtctcaaaaaaaaaaaaaaaaaagaatttttactttgtaaaataatgagaagccattgaataaggttttaagtaggaggagtatttagaaggaacacttaggttgcagagtggagaatggactagaaaggagcaaaattggaagcagagtactgttttggagtttgatgctataaactagatgaaagataatggtgaccttgcttagggtgaaagtattggggattgagaggagtagatgtattctggaggtatctgggacagcggtcccgaaccttgttggcaccagggactggttttgtggaagacaatttttctatgaactggaacgttgggagatggttttgggatgaaattgttccacctcggatcatcaggcattagttagattctcctaaggagcacacagcctagatccctcatatgcacagttcacaatagggttcgtgctcctttgagaatctaatgctgctgctaatctgacaggaggcagagctcaggtggtaatgcttacttgctggccactcacctcctgctgtgcagcctggttcctaacaggccaaggacccagaccggttcgtgtccgcgggttggggacccctgctctcggagataggattttgtgattgattttatatatggggtgagagagagaagtatgaggcaaagatgactgcaagttttcttcttgaccaaatgtgttatagaggtagtggcaatcactggtctaaagacccctggaagaagggtaaatttgaggttggtgggggagatgttgaattcaatcttgagttttggttgtattgcatttgaggttcctgttagattacagttgtctcttggctatgtagatctggagctcaggaaacacatctaaattagagatagagataccatagcttatgtttgtaaatgaatccaaagatgtgaatgagatagtccagggagtgtatctaaagtgaaagaaaggaagggttaggttggagccctttggagcaccaaaatttaaaggataggtagaagaacctgcaagagagattgagctaaagcagttagaaaactaggaagaaggaaggagtatgatagtcttatatagcatgaagtgagaagtgttttgagaagaaaagactaatcaaatgatgttaatgttcaaataagacaaggaattgtttcattttgcataataaaaaggatgtaattggttgcaggcatgagatataacaatagtgtctgaagttgagctgtgaaaaggataggactgtggttggaggacactgtatttgaggaaggttttgtttttgtttttgttctgttttcatttttaaactgtagggcttggagcatgtttcattgttgatgagaaagagctaaataagaggaggttgaatagttaagaggaaacaattgagagagccaagtctctgagagcccaggttgctgggagggtttgggggttagtcttaagtaggcagaagggttcctttttctttgtgagcagaatgagttgtaatagctgagtacagatgctggtagctatagttttggtaacaagaagttgagggacttctcttaaaatgccttctgttttctttgttaagcaggaggccaggctatttgctttgatagcagaaaggaatagaaaggctggaagtttgaggagagttggcagtctttgaaatagcttttctggagaatgagagaaataactttaaagaaatactgggtgtgttgggcagcactgtgaatccagttgaagaggggaaacatgaattttatgtgattttgttctgatagttgtcagcagaagacaggtaattggatattattggtggttcctggggtgggagggaggtgttatcagttgccttgcaaccactctggattctgaatcagctgaggaatggaaccaagagttgtatagaaatcagagtagcaactttattgttaaaacctggcttgggcctaaatctgaaatgaggtctcccacaggttttcttctaaattaaatttacccatctggtcacaggcagaatagctaaaaaacaagtctctgtgcttaaagaatgaagtttttccctgatgagcttctttatgggagctaaactgcaagaatagtatattgtttgaaggcaccaagttcccagtaaggagctcaaagaggttgtactttgcatgcacactaaattttataattaatcttagctaacagtgacacttagggatgttttgctctcactatgattacttttttttttttttgagagcagtaaagaggataaaggactacagtacttcttcaatcacatttccttctattgaaaacaggcctgtgctctcttttaaaatgtgaggagaggaagtagtatatcttacctttagcattcattgagcgatgagattttgccagataagaatacagttcatacagtgagaattttgagttgatagagggatagccctgtaaaaatgttcattttttggttgggaatgtatgactggcccctgagaagtgattagttctgcaaaatctgtgtagactactaagattatgagagggcatacattttttgaaggagaagataatgagatagaatcagagggctatcagcctgggaaaagattgctattaaggagttggaagttgaagacttaaccaaagagggtgagggtagatataagggtttggagagtaaatgtcttgtagtttttatttttgttgttactttttgggatgtgtaagttttctgaatgaaggttggtaaagacagacttaattgataacagatgaaaattataaaggaaaatttagttattagtagttgggatgttttcctattggatcatttatgaatataatgttttttaggtaataaatttacacctcagtttgctttctttggacttgtaataatctgccactggccaagtttcactggtagtagaattcatagtatggcaatacttctttaattcagcttcataggcagtttcaaaattattaaccccaataataattggacacttgatgagaatataaagtagcaatgtagtatcttttaagatattggtccttaggcacagtcttaatatgggtagagctgtttcaatgctagcaactgggtcttctagtgcccaagatccactgtaattttcttggaaaagtaagagggaaaaggaagtcatgtgggaactattagcaactaatttgctgtcattcagtcatttattttgaaggcattaattcagaaatattctttgagcccttactatgtgctaggaactgctcagttcaattgctggagggtaaaaaaaagatgaataaagaaaggatccccacactacctccagatttcttatataaacttaggtagacagttacattttcttgacccaataagcctgaaattctgttcttacatattttgactcttctaattagctcagtcttaattgctttctatttttaactttaaggtttgagtgtgtgtgtgtgtgtgtgtgtgtgtgtgtgtatttcctttgttctgttttctctaatttctgtttgcccagaagagtcagaaaaaaaaccacttgtctctgttgcttctaggaaacatggcattaaacaggatcaaatggaaaagtattattgcgactgtgaggatgttagcaagtagttttccagatcagatggagatttagttgaatgctaagtggacagtgttaactaataggatatttggggacgatcagataatttgggtggtctcttgagattttattttttgaagtcagttatcaaaatgtctttattagacctttttagaaggggaggggtgcaggttggttaggttttgagcaactttggtgtctagagatacaatcttgtatttggtatgaatacttgtaatatgggaagatgttataatggagactattatgaaaaatcctaatttatttgttgagtaaatgcaaatttaaagcatttatgtcttttatggttagttttgtaaagaaaaactttcttgagtttttctcagaatattttgatagaactaataggtagctggctcatcatgccatgttgtttttttgtgctcatagtttaaaattgtaataaggcttgctatgaaatactgctgtcttctgtgtcctccatgcttttccagcctcctcatctccttcatactggtttctctgttttcatttggttagttctctagtcactaattcaactctgaagtttcccctaattgtttaaaattacactcatgatggtaaaacatatgagctagtctatttcatttcttgaatacatgtctcaggagctttctgatttgctccaatctagactggaggtatctcttcttgcttcataggtattgtggaactcagttcactattattctgggagaaatccctttgcttttcactttagttggatctttcctaatcctatgtctttttctttcttgtcttattctcttggtttactccatagcttttaaagaaagtgtgcaataaaaattgttttgagactttacaggtgtgaacatgactttattcttccctcaattatatgttggtttggttgaatatagaattccatgctgtaaatcattttcccccagaattttaaaagcattattagtccattgttttttaccttccagtgatgctgttatgaagtgtgagaccattatgttgttggtcctttgaatgaagcctattttctctctggaagcttgtaggatcttccctttgtctctactgtgccttgctgtgggttttttttcttctttttttctcttggacagttgatatacccattactggatataatatccttttgttttagaaaattttcctgaattattttgttgatgatttctttacttttgttttctcttttctgtctttcttgaactcctagagtcctaataattagatattacgtatcctaggctggatcttgtaacttttttttactctgacttcccatttttttctcttatacttttttaaaagaaaatttccttaattttattttctatccggcagtttttcatttctgcaattatatatttttatttccaaggcctcagtcttgttgtttactcctttcttgatcattttctcccctgaaattagggcatcctgttcgtaattcatggatgaactatcttctgttgttaactttctgaagatactatggttttgtttttttctttcttggatagtctttgtttatttcatcctagttttcttttatggtttggtctctatttttttcttctatttgttttttaattagatgctttcttcatctctttggtcgtccttgatagtctgttcacatgtaagattgaggcactaataaagtagcaaacacttatataatgcttagaatgtatcagatactgttctgagtgcttcatctgttttaacatatttaatccttgtactgactttaggagttagctattataatattcgatagatgaggaaactgaggcacacaatgttttaagtaaaatgcccaatgtaacacagtaagtggcagagctggaatttgaatccagccatcttaactctatagtcccttcttttaacctttatgctgttctgcctgttattaaaattagaagctaattggaaattttgtgcttgtgggtgggatttgtcaaagtagtatttcatgagtgagttgtttctttgtggaacgtctgataaggtccttttcatgggttgagtagattcatcactgaagaatctgcagctcttctgactagaggtttcagcccagccgctgttgttttggttgctgagtagtgaaagatgtctggagttactggtctacatatttaaccaccctctcccctccccaagatataacttcacctagtccacctgtgttgatatcttcctgcctggagaccctcagctttaccctgtccagggaatgaacctccagtcttctgctgtggtgataaattgtaggttacccagttgtgcagattctggcagtggtcttagcatatacctatgactcttaattttgagtttcggttttacttgactttcagtacctcccattgctgagccttttgaggattctcttatgtattcataagtgtgattctcatttttccagtgactcattttccttgtatttgctttgaaatttcttgtagttttctcatttcacattctctttgacctaatttttatgcagaagccaataatcaaaagaaatctttgtattcttacagggatacctttccgtaaagatgaataaaatgtgtgttttgatgtgccatttgacattttctgtcagatctgttgaaatctttctcaaatgtctccttctaccttaggcatttaatgatgcttccaaccagatatatcatcttctgaaaatctttcttcttactttggaaattttttcttctcttttgagactcttttacatcttatgttatttgtatttgaatgcttttcttacactctgccctcctctgtacaccagactgtaacttctttgaggaccttaactgatacagaattgctgaataaaagtttattacattgtgtattctgtatatgttttgtccttttgtatgtctttcttataaaacatttttagaatatcagcagtgtattaaatattcagactagcaaagtagggaattaatacaataaggcaaaaaaagagattaaatttagatataaagaagtttgagaattgttagaccttgatattgtgaaaactttcagcgtagattcctaattataatgaagtatacacctgtctttctgccattacacaaaagaatgaattatgtgatctgttaatgttttggccaggcttatgattctgtaacttagatgtcagatatatttgctgttgctacattcttataatatttgtagtttaatgggctataatgttaaatgctagaatattctaaaatacttgataagaatgcactttagataaagtaaatattttaaatgtattggagtagctaaatacataaataagcccacatttgtatatttccttttaaaaactgttgattttcatattttataaattttatttttacaagtcaatgctgttaattttcttttctcctatttaaaatgctcagaagtaaactattgcaggaattgaagtctaaattatatgcagaaagattattgctttaaaaatatttctctagaattatatgttaagtaacttgggacataatttgtttttttaaacgtattaatatttctttgaaaataaaaggaagagtatcatctgcttttttttttttttttttgatggagtttcactcttgttgcctgggctggagtgcaatggtgcgatctcggctcactgcaacctccacctctcaggttcaagcgattcttctacctcagccccacaagtagctgggattacagtcgtgtgccaccacacctggctaattttttgtatttttagtagaggcagggtttcaccatgttgaccaggctggtcttgaactgctgctgacctcaggtgatccgcctacctcagccttccaaagtgctgggattacaggcgtgagccaccgaatatgtaaaagttgctggagtctggaaaacatcagtggtcactagtatgttcttttgcagagctaaatcagaacttaggaaactgactgtatttggttcattaccacagtcaaacaagctgaaatgattgttagatgtgggtatttgtttttattttcaaattttctgtcaccttacaaatagtttattgggaagtgacttaagaaaacacacagaagcattactctaaaaattccattcttttgaaaccatattatttgagtacagcatatgtagatgctaaaaattttttgtttcttcagattcatgggatacatgtggaagagataaagttggtgtttatagtttgacttggttaattcttaatgttcatatcactcttctttcataatttcttcatgaaaaatgtagccacatacagatttctgttcacttgcaacacagaataatgtgagttccatttcaaactaaacatcatcaaaagtttctgaaagtctggtttatattttttaggtgctatacgtggatgacctgcttagttttaatttttggagaaatacattttataaaacattttcatcagattgctaaaattgtgagtaatggtaatgataccatgattatattctggttaatttaatacctttcctttttacaatatgtttctgtctaaatatatattttttagtgtcattacctactgagtttctgtgaaaagaatttcctttgcctgttaaaacaatcgttgaaattaatgtttttactgtttttttctttgacaattttttgaattttctttttgaaggtgttagcactagtttccagaaggtaaagcacagatatagatgactacttaaagcaaatgaccttagaaaatgcccttaagattaatgtttaacatatagtttaatatgtatagctatttttattttagaagtgggaaaggattgttttcctgtaatgaagtccatcttgtattactgagtcaaggaaactataatcaacatttgggtatgttcacttaaagttttctttttaatttaaaacattgctttttaaattaacttttaggttaaggggtacatgtgcaggtttattacaaagacaaactcctgtcatgggggtttgttgtacagattattttgtcatatggtcacttctgaatgatagaaaaataaaccaattattactgactagagtattacttgcagctatagattcacaattacaggttccaaattgtaaattaagaaacaatctatatgagaacttatttttcattttaatgtatacttcctcttactaatttcaccttttcaggttatttagttcttgcatggtttgtttgataaagctgctgctcctttttttttttttaaagccctgatactaatggttttatcttttcatttttatgatatacatttaggactaaaaaagcaaataatatttgagtgcttgtctctcttacatactttaagagtaaagaaaagaggaattctggatatttatttgtgtttttctcatccctcatctcccatgaatacatgacttgatttatcttgatcagcctagtaacttgctccacatttttccaaaagtgcaaagcagtttcagctaaaaatacacatatcaaaatgatccaaaagttgtggccacagctcaaaaatgctgatcaattttgaaaatctaaatcagccttggccctgaaaccgagggaagaacctttgtggtaggggacagatttccaaaaactcaccacagtcctgttcttagctggagtttgtgctgatgttgccagacaactgaggaatagatgcaaaaagcaggaagcattattgaattgagctctagtgccaatttgggaaaagcaaattaaaatgtaaaagaatatttttccactcctggcatctcaacataaaatggcaaaatacatggttgctgaaaaagttacagaaattgctaattttgccaaaaagtaaaagccaattgcaaattcttttttgcataaaaaatgcatagacagttagaaattctaatttacaaataaatatgtatacatttaagttggagagtattttgacataaatgactgtgtgtgtgcgggcttgtttcaatatcttatatttttcaggtgccacttgaagaatggatgatgatgattttggtggttttgaggtatgcactgttatttacattagtttgttttaactttgtgggattataatggagtaaactattttgaaaatgtattatatttcattggcattcatgatatttccttgatcattttaatgtaattctggagtaaaaagatgaaatcaagaaaaataaaaaaaaaccctctaaaaattaaaactgatgtattattatagaacatttggacttgcccataggaatggtttaaattgagttaattaagtgctaccagtgtaagcactaaaggaaagattttaaaaattgtcagcagatgattttattgggatacatgtctgttaggaaatacttgtgagatgatggatgagtactaaagatcctgtcacatatttgcatgtttatacctgcaatgagttgatttagtatattaagtacatagccttttggtggttataaagttaattagtatgtttgtattgttagattattctagtaggttaggaatggatactttgtaagtggaaattgttagctgaaggagcactgtcttttccttaatccttttcaatgtgtgttcattttattgaaatattttataacccagttatttttatggagccagtatagtcttgcaggaaaatctctggattaggagtcaggaggcctgagctcaagtcctggaactaccatcaagggaatgctgtgatttttttttttttttttaaagaattttacctactttggatttggtaaaaagggaattataaaaaccagggattgtaattaatgaccttaataggatgaataagatgttaagtatatattcagtgttgtgaatttcatgaaagaatggtgtgaggtttttgttaggatcttcttctcttttgctgatctttaaaatcagtcaatatggagtatagacatacctgttttctctatttcatctaaaactggtttttgtttaagcatgcttgtatgcttaatattttggttttgttgagtgattgaatcttatttatgttactgaaatgtaacatttatttttgttaaaatgccttccattttgaggaaaatgtatgtttcagatatcatctggcttagtttattgtttagaagttgttatttgagggttacagtctggcatagtcttctttatttaaaccacacttcatgtattatttaggaaaaaaatacagtggatagtgttctgtagaataacagtattacactttgttatattcatcaaattgattcctttcagtactgcataggtacaggttaaccagtgttacaatttaattgtagttattaggtttttctttctttccatatcctgctgtataaatagggaaggtctctacccttggttatataaaatatgttcatttttcatagttgtagagaatagctactgtattctgtgtcacttagctcctgtgtcagattaccccttttaacttctccttaaggggttggcaactcagtggagaatacacattgaaattctggctctaatttttagtagaaaatttgctgtgacctgggcatctaacagacagaaaactctgtgctcttacctacaaactcagtattcagtaattgttccaaaataggacggcttgttaattgaaaacttgagttttagaaattctctaaatattgaaagctattaactctaggtagtatattattcaagacagatgaatcctatttctttgaattaatctctaattgggtcttgtgctaattaattaaaagaatttggtgtctatattttttaaagacaaatatttttcctacatagatggttaaatgtggtaagttaagttaaaatacttaaatataaagtttacaagtgaaaatgtgattaagaatatataaaataaaaatattgactaacagtagagttatctgaataaggaaaaaatttttacttgaagttaataaggcatgggtactgggggtggtgagtcatgataggagtggtaggagttaagactgaaaagcagttatttagagggaatatgaaaatgtctggtgtgttatagaagatatgcctattgaactggaatgcttgatcacttaaatagcatttctgcttttcacatcttctaaaataatcttgcctttgtcttgtaggctgcggagacttttgatggtggaagtggtgaaacccaaacaacatctcctgctattccttgggctgcctttcctgcaggtattggtatccaggaattagggtttttttttttttttttcccatgtaacatttttggcaactctttgaaaccctatttctcaacttttttacttgtccttcactgatctgaaaaatggagtgatccagatttactctttaggtttttaaaataacaaattgtgaattacataacacattttgtgatggtgacttgaggctgattctaaagatgatatcaggaacattaaatgaaattaaaatacaatttacatttttaaatttatcttagtttttggaaggtgaggtgcccaataacttttttaggttgtccagttcattaaagattcctttttatagtccaaaaataatttatcatctccaacatatttaaatttagaagtgtgtttgcaataaaattacttaaaaatattgaaaattaaaattaaaaattaaatacaaaaataaatccattattgacagatgtttcttggaagacctcatgtttaatattaatttatgtcaaaagaatattttgagctttcagagttttctgttaaatctgttaaagttgggagaagatgaaagtattttcttcaacagctctgcctagacctcaaatgttacagttatttattgtaaaatattaatcaagtgcttattatgcattaggcactatggggatatagagatgtatggaacatagtctagtcctttacttcaagggtagataaggtaggcacatgcatatttgtaatatgaaatagatttgtcatttgggaagaatgatgattttatcatccatttatttagcaaattcttattttcatacctgatctgagtcaagtagtaacctggcagctggaaatatatgtatatgtttatacagttgatctgttctctgaagggtgcatataatttcaataggcagatatgggagaatgaggaaagattttgaagggagaaagataaatggaacaaaagtgtaaatgagagaaaggtgatggcattgttaggatgctcatttttatttgagggctgtgtgttatttcctttgctgggaattgtctttattgcttctcattgctgttcattcctacccccttatgatactaactcctatgttttaaaagtatttcttgctttaatttttttttctgggtcacctttccagcaaaccctcccatgtctacgtgcacctattatctgactttcatgttggacagcaagttttgtgggttagccactatgtctgtttgtcctgttgttatatcttaaatgtggggcatagtatctggcttatagttggctctcaataagtatttggaggatgaataaagaataaagtgaacaagggaactagtaactgaatgaattaacagattagcatggcattggaaatggatagggagagctgggatagtagatgatatttatataatggctcaggatttttagtgtgctgtcatgcatttgtttattgtaaagtaggcagagcaactatactctttccattgtgtggatgacaaaatggttttaaaaagttttatcatttgatacacataactgtgtttagggatgaagtgtattctttcagattctatttcagttctttttcaataactcaggttttttgaaaagagttatcagcaggactgtctggatgtgacagtgaaggaggagttaaaattgatttttgaggtttcaagtcttggttctgaaagaatggtgttaccatgaacagaaatagagaatttgagacttggatttggacagatggagccttaatgaattaatgttagacatgtataatatatttaaggaacctgaaactcagaagaaaggttagggctggagttcttggtttaggagttttcccattgataatgacacttaaagttgtaggagattgctgggaggaagagtacatagatagaataaggctgagtagattaatttggatgtttaaaggtgtggaataggaggaggtaaaagagatctgagaagtaaggggattgtgggctagtgctgcaacacagaaattagaagtagaaaatttcaaagaagctatgggcactgatgccaaaggcattagggaggtcaatgagattggaggctgagaaaaaaaccatagatggtcataagtggcttttgaggaaatgatttcagtagactggaagtttaaggcaaattgtacttctttactttttatgaaagcatgaacagagtctcttttcttataataaaactgtggcaaagtactaaaaaattgtatattatgagcaaattatctaattcctcttctctaggagtgaatattatatgtcacatctgcacgtctgtgtattagtgggtcaagttctcaaaccttcgcgaaactggaattaaaggacaaatcatctggcacacacacacatgcacacactcacactcacacactcttttttccctcactccctttgaaaaattagatctgaagaattaactctttctagattttctcagtgacttgcagaaatggagaataacaaacatggctaagggctgaagttaaagacatggtgcatgtttgctcagccaaagctatctttttcctttgttagttgtcttcctctgactggagaagtctgcctcttgattcaggtagctggaagttgtttaggtgagtgtgatgtgaacagcttacgtagctaacaatgtaatcatttccacagtaaagacctgagaagataggaaccccttaagagatctaaggcagattcttttcagttgaagaaaagactaattttctccttttttcccacctacctgtatcttagctgtctataatccatatggaaaatattttaaaaagacatgatgattaaccaagctttaccacagcttaaaatccaagaagagcactaagaaacatttggtttacatttttaaagttttttggggaaaataaaaatcttcattcttggggttaggataaaggattttgttaagtaaagaatgaggtgggtttggtgagcctagtgattctactgcttcaggacaggccagtaggtggaggaggatttcataatagcaactgggataataatgtatttcttaaagtgtctgtatagcctgcagttctgtcaatgggttgaggtgcctcaagacatgcatcttactgtatgttagcattatttacatagtgaactcttaaaatgctagcttataggcaatgttgatgaaattaatgaattgtcagtaagaataaatgaaatgtgcatgctgatgctttatacaaagtattatctctaggcctgtatctccttaagttatgatatctaacctgtaaaatgtgtctttacacccttattgtcataggaattgcagaatgtaaatacgagatgaatgaatatgaaattatcaagctcttttcctaattcctttactctccataaacatttagaaattattactttattttagtgaaagctacccaaggagaagaactgcctttctttaagcattttcctctctgtttcatagcctaaccctccacattgccttccatgctattctgcttgaagcctgtaagccaaactgtgatacacatagtgttcccattgtctgttcctatatttttgtcattgctcctgattgtattacttacctcatcttccatccacttacttgagtcttatttttctttcaagaaaaagtatggagctatcactgaatttgttctgcatctcattaactgctacttcttttgagtttaccgttcttttacttctgtaccagttgtttggtccttagcatatgctaatttgtatttttaaaatttgtggtaaaacacataaaacataaaatttaccatcttaactatttttaagtgtacagttcagtattgtatatgtaaaaccgaaactccgtatccagcaaacaactccccattgcccccttccctcagcctctggcgactaggatcctattttctatgaatttgactattctagatactttataaagtaaaatcatacagtatttgtcattttgtaactggcttattttacttagaataatgttctcaaggttcatccatgtggtagcatgtatcagaatttccttcctttttaagcctgaataatattccattgcctatatagaccacattttgtttatctgttcatttgtttatggacactgggttgcttctacctttgactattgcaaataatgctgctataaacatgggtgtctaatttgtatttttaaatattttataagtatgactcccatctctttatgtctatgttagtctgagatttggagggtagtgactgtgttttaaacctgttgaatccttggtgtctagcatagcactgtgcctttttaataaacaatgtgtagtaattatttcttgatgagtagagcagatttactttgttaactcttcttgattatttttaattctttggggataattagtctttctatcataagttgaaagaaggcaaaaccaaacttgccttcaaaaatatattaatctcagaaatcttagctaattactcaaaggcagctaaaaagctgttttttttttttggtgctcaattaactttcctggtcattctcaatgcaaacatatgacctggaaatcatgattaacaagagcagtcacagattttctgaaagaaacaacagctattttggtgaccttttctcatctcttccctggtcctgctgtatgccagtaggtaacaatagagactagactaaattttagtttaatatattacaggtctagaaggaataagagtagtatgtagttcttttgccttctttttttctaacttacttttctaaacatttgtttccaaagaaaaatcatctccaactttgcagagcatctaacataagaaagtttttgagttggctactcatagcactgtattttataaaaaaattaataattttttttggctaagaaatctcttttaaaagaaattattcacaagtaactgtcttttataaatgttcataaggctagtaatgctctactttttagtaaactaataagagcagagacttttcaaaatgaatggctatcttcttatatataaatatgtatgtatatatgtatatatatgtgtataagaatataggcgcatatatatatatgtctgtctgtgtgtgtgtgtgtgtgtgtgtgtgtgtgtgtgtgtgtgtattctgatttcttccttttccccctccaatgtaaattctttacctgtactgatttgaaaggactgtatcatgacttgaccttgcaatttctaagaagttagtcttagtttggtattactacatgtattttattttattttctcattgtagcggactcaaagtttcagaatccatggagtttatttaaattaattctttggtttgtttgttcatttgtttattcattcactcacttagcatatatttgaaaatttactgtgtttcagacaccaaatgccatgacccgtgcaccttatttcattttcagtgatgccatataaaggctgtcatctaaaaggacaggatgtctcatgaaatgtgttgttaatattggcaaacactttcatcagtaactttaagttcaaatctttgatagcagctacatgaaaagaatattatgtcagaaagtgttgtcatgttgccattgtgtacaatgtgggtggtgctgttttagaggcaaagaactgttcactttttatgtttaactgtataaatataaattgtctagaaggcgaagtgggaggcaaaaccttgaatagtgtcctttctaatatgtttctaagttccttgtagcactacacagaccacattagaatgcattgaccatcaaagggaaaaacaagctatccagatagatactttaatccaaattagctccttccaaacagcttatatagagggcaaactaaactgtcacaagctgaccctttagaaggaataatgggaattggaccagcagatgttgaaccaaataagttagatgtggttcactttgcatctggagctatttgcatacaaagccaacaggaaagttcaaacatttttctcaagacattggcagagagaaacctggaagacagatgccttttggatttcatggttcaatttttccattctccattctgtccaggaaaacctaggacaacagatcggtcattttattaatatcccattactctccttactaaccctgtttttccagtagaatctgtgttacatatctatgagagctcagaacctgagtccacaaatttttgtttgaggaaaaattgtctcaatatttttcttcagattaatctgtagtttgtacctagtaataatgaatgttaatcaaattcatttgtctgatttatatttgaggtaaaatttgaaggtgacttattacatagtcacatatgtgcattatggtaggcagtataggtaatgcttaaaaactttccgtctgtctttgtatttacattagacatttttgtcaggacataaaccagatttctgttgaagtctaataattttgtagtgcctttacacagattatttgaatagaaatttgtcacatatcttctttttgctacatcttgtattttctgtttaactcctaggttattaactcaccttcttttactctggagccagtttttaaaaatgacgcctaaaatgatagcttctataaagctgtgaattattactgtacatataaatactagtcttgatgtgggttttcagtaatttattgcagttcatgtttttattaatgcatatgataggaagtatacagtgatatttgctatgcttctgaagattaggtttattatagtgtggattagagtcaaatatccgtgttgtggagtgaggatttctgtctttgccttcagctaactatgtaacttctgtgaatctcaattagcaaatctataaattgaaagactagatgatatctaaacaattctttgagattttgaattctcagtttagtattttattttctggtcatagtgtctgtaacatgaatagcttttactaggtgaattatggtgcctggtttaactgtgtggtataactgacagtactaatctaataaattacggtggttctaaaaacatagaacacaaatattaatgtgaagaactataattcttaagagaaaccttgtctttttcggtatcttttaacaatcaattactgttcacattgctttttctaacagtattttatggtacctgctttatctgttctatctgaatctgaatttgctttttaaggactgtggtgtgcattttaggatattttaggatatatttagagaaaagtaaaatagtttgaaaatagtgctatagggattttctgatactgctaaaaaatgaaggtttggcaatgagtattttttctataatatgaagatagtgctctgactctttataatcctaagttagcgccccccgccccaccaaaaaaaaccactggaaataaaacaaaatttagattccatttagctcagaaacagtaggaatcattgcctaccattcttataccagtatatacaattctcatcagctatccatcctgaattacattttttggcctcagaaaagatactttttattgtttttgagagacacacgtatgtacatatatatatatagtataagggtatgaaagaaaagggaaataatgcaaaagatatacagtgaaaaatttttcttttatcttagttctctagtctcacttctgatgctatagttttataaattcttttttaaccatcccaatatcttccaggcatgtacaattgtgtcgtgtctatttttttaaatagagatgacagtgtattatatatacatagtaatactccttgcttttttttccacaataatttggagacctttctgtagaagtacttatagattttccaaattcattttagtggtcgcatagtactgttttttaaggatatattattattaatgtaactagttattttcacttcagttcttgccgttacaaacagacctgtagtgaatattcttgtattttcagcaaagctattttaattaggatgataatgtatattgtttctgtgacttgaaagattatttaaaattaacagtttacttactaattttactaatataaacatagaacaagacatgctctttgactctgaacagtgtcaaaatttatatttgaggtcatatatacctaattaatatatatacccaattaatatattaattatattatatgttattatataaattatttattatatataattatataattatatatattatttattatatataattatatattactatataattatatataattatattattaatatataattatatataattatatagtaatatataattatattattaatatataattatatataattatatagtaatatataattatatataattatatataattattataattatatataattatattatatataattattataattatatataattatatataattattatatataattatatataattaatatatacccaatcttaattatataatacttaattatatgattaataatttaattattaattattaattaaaaattaaaaattaaaaataattaataataataactttttgagacagagtcttgctctgttgcccaggctgcagtgcactggcacaatcttggctcactgcaacctctgcctcacgggttcaagagcttttcctgcctcagcctcctgagtagctgggattacaggtgtgtgccaccatgcccagctaatgttttgtagttttagtagagatggggtttcaccatgtcagccaggatagtctccatctcctgacctcgtgatctgcccacctcggcttcccaaagtgctaggattacaggcgtgagccactgtgcccagctggattatatttatataatagaacaccatacacctggaaaattaacaaactatagctacatattaacaacatggaagaatctcatgaccatctgtactgttctcagagtacctttaagagatcagtaggaagccttaaactgacagactgttctataatgttagattctataacaccacattttcatagaatctgtgaagtctagaatatcagtctcccctttggttctggaattcttcttgttcgttagaatgagggctccattattttggccacagagctatatccaggactgcttcagagcaagccccgtgtctgaatcttcagagggtagaagtcatcatcctgtttactcagtagggatggcatggggaagggaggagggagtagattttacctaaaatctactgtggatgaatagtgcaatatgagactaagaaaaatttttgaatctgacctcaagtgcctggtatggaggtcacagactaagactggacctgaatcaaacagaataacctccatcactcacttcctccctccctttacccctgagattcttgtattggactcttgggcctagctgtagctggaaacagtaaatgcttttgctgtatgaattttcaagtggccagacagggttgagggacccacaggaacatgagacttacaggacaagtacaaccagaggttctgacagatatgccctatgcacatttggcttgatgtctctgtactgatgcccgtaatgaatactgttgttgctaatgtgtattttaaatgaacttatactttgtatttactcaggttgagttttcatgtatttcctccctctttttaaaggttgggcatttgagcttcttaaacggtgtctctaattcttggtggtattctcctctgtatttgtggtacttcctctttgtggcaggcggagtgggagggtaccatgatttcttgagattctggaatcttccaacccctttttgtgcccattctctccttgtgattatctattccatatcccacccatcagcaatttctgtagtttctaagttcattcaaaccagggatgttttcagttctctctacttccttggtcactatctcagtcaaaagccaccatcatatctttcttagatgacttaagcacctttttttcctgcatccactctcagtgtctgctccccccaaccaaccctgccacccatgactccattattttaagtggcaccagagagggctgggacacagtgaatgatcagtaaatgttacctgtttgtgacatttgattttaaagtttagaaatgtgtaggatttatgttttcatttgttgtggattcctgaatatcaataaaacatgatttgattataattttggaggttgtaattttgacttatgatattcctctgaatattttgttgtaattcctttgttgggcactaaagatttgtacctgttattaggaatctcctgaataaattttacaaactaattgcagttataaaatcctccatgatttgggtattgctgttgtgcctaatcaaagttttttttagtcccaattctgatttttgtattaatttacatgattatattggcttgcagctagtatgcattaatttttttccttattaaagcattgctgaggtgataatcatttttaataatgatttaattaataaaaatgtttaataatgatttaataatttcattaataatgaaaatttcctacatttacattaaaacggaaaatcttctagatttgttttttttggagtgactgtgttaaaggctagttttattgtggacctcctcagatagattgttttagttaatggaccttcccaagtaattttagaataaatcacagagactgcctaaagtacttagaacacaaagatgtttagagatatactttagaactgtgaatcaatagggaaggtattacttaaacttaatcctatagaaagtttgctaaagatatgaagagtttgatcattttgtatctgtcaagtctgaggccatagaaaagtggataaaaggtgatttagctggtttggaggaaactttaattcaatgtggctgacaatacagcgttgacaaaatactgtaatcaaatattacacacaatttgattattaagaaatgctttagttatgtaaatcaactgttacttttcttcatctcttaaaaatttacgaacacaatgttaattttatttcaaggaaacatttgctgatagaattgtacattaaatgtgcgaataaacatttactcaactcatcaatccattaggttcctaaaggagcaaccttaaagtaatttcaacccttggtcttataatctaaacacaagtattttgcgtcgatggaatatgtttgattaaatttgtgaaatttacttctcctgattttttaaaagacaaactagattctcattggttatgatcctgcttgacgttaggaggtaagactgtttacgttcaaccttctattgtttgatttctcccccattcaacaaattattgtatatcaagcacaggtgagacaatggggaacaaacaagacaaacaagatgtttgccttcctggcttttgcaaactagtaaggtacaccgaaattaaataattattcagattcttacttaattatgactaggatacacttttaaggggagatatggagtgccagcatagcgtgtaataaagggatagagagagtgaggtaggtaccgcattatagctaggaagaatatcagatacaggcagtgtttgagttcaactcaggattagcaaggcaaacgcctatgatgttaagggaggcagggcttacaaaaagctttacagcagagacagagggaaacagagagcatgttttcaagtgttaacttttggcaatgtagatacactgtcaattttatatttgttttctgattaatttctctttcatgatcattattttctattgtctattttattgtttattatatttttcctaattttgtaaattttatgcttatcttactacttttaacctttcttttcagacagaagtattccaggctatgattttccctctgattactgctttaactgtatcttgccaattttatttttaaattacaattttcagattaagtgatacttgaattttttaaaaagtatttcgtaatttccaagtatggggcttttccagttgtttttattgttattgttttctaatttgattgctttttattgttattgttttctaatttgattgctttttggccaaagaaagttattagtttggaagttatgtactctgcttcttttctttccgtagtatccctggaaattttcataagcattcttaactcactaaaacctgaaactaattagtatctttagcctcctcttgaaaaatacaaagaatgtggaacatttgaaatttattaatttattcttttgttattatgctattgtgtagcattttaaatgtgtatatatataagtattgtatatgcatatgaaatacatactcaatacataatatatgctatatattatatataaatatagatattatatatataagtccacaagacattattattagcagtattatgcttgtttggaaatacttattcttgttagatagattcctctagcttttaaattgacagttatttctttggtctgcacaacgtagatattactccgccatcttctgatttccgtaattgttttgggaagttagttgattccattagttgttgttccattgaagataattgctcttttctttctggatcacttcatgatttaacactatgtaattgttctgtagttttactgtgatatactacataaagataccttattttctttgattagaattttttgggcttctgaatgtatggattgaatctttagatttaagaagcccaaaaagctcaacaaattaattatgggaagttttattacttctgaaaattcttggccgttgtttttaccaatgttgttgttgctccattctctttctccttctggaactctagttagtgttagtaaagtcgcttttttttttttttgaaaaaaaattaaaaaactctctctactatgtccattaacctctttttcacgttttggctgttctgccatctgagtaatttcagatatggcttttatttcactacttctttattgtctaaggtgatgtaaatctgtccattgaatttataatttcaattttctttctttccttcctccttctctttattcatatattctgctatttgatgccgtaatgctctcaaaagtgaaaaactattcatgtgaaaaggaagcatatggggaccttatgtgctagattctgatattagtgtgtttctactgctaagacatttgtacctttaatgcactttagagtattgtatcattattgtaatatatgcttatggcctaattagaaatgatgtcaactgtgcttgtataaaaattctttttttttaaattatactttaagttttagagtacgtgtgcacaatgtgcaggttagttacatatgtatacatgtgccatgttggtgtgctgtacccagtaactcgtcatttaacattaggtatatctccaaatgctatcccttccccctccccccaccccacaacaggcccctgtgtgtgatgttcccctccctgtgcccatgtgttctcattgttcagttcccacctatgagtgagaacatgcggtgtttggtttcttgtccttctgatagtttgctgagaatgatggtttccagcttcatccatgtccctacaaaggacatgaactcatccttttttatggctgcatagtattccatggtgtatatgtgccacattttcttaatccagtctatcattgctggacatttgggttggttccaagtctttgctattgtgaatagtgccgcagtaaacatacgtgtgcacatgtctttatagcagcatgatttataatcctttgggtatatacccagtaatgggattgctgggtcaaatggtatttctagttctagatccctgaggaattgccacactgacttccacaatggttgaactagtttacagtcccactaacagtgtaaaagtgttcctatttctccacatcctctccagcacctgttgtttcctgactttttaatgattgccattctaactggtgtgagatggtatctcattatggttttgatttgcatttctctgatggccagtgatgatgagcattttttcatgtgtcttttggctgcataaatgtcttcttttgagaagtgtctgttcatatccttcgcccactttttgatggggttgtttgtttttttcttgtaaatttgttggagttcattgtagattctggatattagccctttgtcagacgagtagattgcaaaaattttctcccattctgtaggttgcctgttcactctgatggtagtttcttttgctgtgcagaaactctttagtttaattagatcccatttgtcaattttggcttttgttgccattgctttcggtgtttttgacatgaagtccttgcccaggcctatgtcctgaagggtattgcctaggttttcttctagggtttttatggttttaggtctaacatttaagtctttaatccatcttgaattaatttttgtataaggtgtaaggaagggatccagtttcagctttctgcatatggctagctggttttcccggcaccatttattaaacagggaatcgtttccccatttcttgtttttctcaggtttgtcaaagatcggatagttgtagatatgcagcattatttctgagggctctgttctgttccattggtctgtgtctctgttttggtaccagtaccatggtgttttggttactgtagccttggagtgtagtttgaagtcaggtagcatgatgcctccagctttgttctttaggcttaggattgacttggtgatgcaggctcttttttggttccacatgaactttaaagtagttttttccagttctgtgaagaaagtcattggtaccttgatggggatggcattgaatctataaattaccttgggaagtatggccattttcacgatattgattcttcctactcatgagcatggaatgttcttccatttgtttgtatcctgttttatttcattaagcagtggtttgtagctctccttgaagaggtccttcacgtcccttgtacgttggattcctgggtattttattctctttgaagcaattgtgaatgggagttcagtcatgatttggctctctgtttgtctgttattggtgtataagaatgcttgtgatttttgtacattgattttgtatcctgagactttgctgaggttgcctatcagcttaaggagattttgggctgagacgatggagttttgtaggtatacaatcatgtcatctgcaaacagggacaatttgacttccccttttcctaattgaatcccctttatttccttctcctgcctgattgccctggccagaacttccaacactatgttgaataggagtggtgagagagggcatcccctttgaaaccaacgagaacaaagacacaacataccagaatctgtgggacacattcaaagcagtgtgtagagggaaatttatagcactaaatgcccacgagagaaagcaggaaagatctaaaattgacaccctaacatcacaattaaaagatctagagaagcaagagcaaacacattcaaaagctagcagaaggcaagaaataactaagatcagagcagaattgaaggcgatagagacacaaaaaacccttcaaaaaatcaatgaatccaggagctggttttttgaaaagatcaacaaaattgatagacctctagcaagactaataaagaagaaaagagagaagaatcaaatagatgcaataaaaaatgataaaggggatatcaccacccatcccacagaaatacaaactaccatcagagaatactataaaacacctctatgcaaataaactagaaaatctagaagaaatggataaattcctcgacacatacaccctcccaagactaaaccaggaagaagttgaatctctgaatagaccaataacaggctctgaaattgaggcagtaagtaatagcttaccaaccaaaaaaagtccaggaccagatggattcatagccgaattctaccagaggtacaaggaggggctgataccattccttctgaaactattccaatcaatagaaaacgagggaatcctccctaactcattatatgaggccagcatcatcctgataccaaagtctggcagagacacaacaaaaaaagagaattttagaccaatatccctgatgaacaccgatgcaaaaatcctcaagaaaatactggcaaaccaaatccagcagcacatcaaaaagcttatccaccatgatcaagtgggcttcatccctgggatgcaaggctgtttcaacatatgcaaatcaataaacgtaatccagcatataaacagaaccaaaaacaaaaaccacatgattatctcaatagatgcccaaaaggcctttgacaaaattcaacaacccttcatgcgaaaaactctcaataaattaggtattgatgggacgtatctcaaaataataagagctatctatgacaaacccacagccaatatcatactgaatggacaaaaactggaagcattccctttgaaaactggcacaagacagggatgccctctctcaccactcctaaaaattctttttttcttagatccatgacctatgtaagtaatttatgaatttatattccttgattatttttaaagacatttggcatctttatgtaatagaatattgtatgtatgtatgtttgtgtgtgtatatttaatcatgtaatatatatgattttcagaatttttgagttatttttctttaaaaagaaagggaattattattggtaatgatagtactgttgaataaacctgatgtcattttggattcactgggtgtaaaccaaagagatatatttgttttctagaatctcctacagtaaagtgaaataaacaggcaatcatacttcacaagtgcatgaggaaaataactattttctttctcttaatgggaaggatataaattatatgaatggtggaaaatgtttcacattttcctgtttctatcatatacagtgtgcagttccctgtgtaactcataaattgataaagatcttggctgaggggtagattgtagtatttgccttattcagattgctgagtactgttaggttcttgagtctgaaccagcctttcaaggtcttggggcaaatgatttttttcattttcataaaaggacagtgatttttttatgtttgagagtatagaaatttaactggtcaaatttactttagaaaaactgtttattgttttgcccattgtgaatattagttaagatttttgtaagctaacaaaaaaatcgaatgttacagaatctgtgctataatccctgtgttcatctgttgaaaattatatgtatatttttaaaggtttatatacagttatgtgtgtaatttagagaaatttcagctgtttgtattaggtattaaatttttaattatgttttgcttacctgctaagacttacgggaaatgaaatttcagagatatggtatcagttttcctaaaggctaattgaagccatatttcataagcttataacttacagtgatatagttacaagtttggtaagtaatgttaaatatttctctgtaagatcacgcagagtagatgttaaaattaacaaatgtctgagaactgaaaaagcctgggttcaaatatatttttataacaataaccccaaaactgaccttcttcatagtattgaacattttagagatttataaatgacattgtcacaaagggaatttctaatactcatcatgaattctataggtactacctcaattaaattacagtttgggttttttctttgatgaggataataaatttttggtatgtcagatgttctttattttaaaattatattgacttttagctaattcagttatttaacttttagcaaaaactgaatacaactgcatttggtaagtaccattataggttgaacatcccaaatccaaaaatccaaactgtgaaatgctccaaaatccaaaacttacatgatgctgaaagcaaatgcttattagagaattttggatttgggactgtcaaatttgggatggtaaatattctgaaatctgaatacttctggtctcaagcattttgagtaaggagtactcaacctgtagtcaatttttttctatttcttgcatcaaccctcctcctttttttcactttgatcaagtaggtcagatttaacatctcatctgggctattataatactaatttaactggtttctttgccttgtaattcattctatacatggtttccaaaataatttttatgtagtcatctttacatagtagttagtttagaactaccctaagttcttttgtctctctttcaagggcctttgtgatctggtagtagccagactgtagacttttcattcactgttatccttgtcatactagtggcccagtgaaactgaaaattactttgtacctcccggcacatatttgcaatttgttcctacttctggttctttgttctggttgtgctattcagctaaaacattttctccatctccgcatgttcagatcacactcttccttcatagcccagtttaaatggctctttctctactgagcttttctgtcagtcctctagcctgcctaatcccaaattttgaagtgactgttctttttcattaattactgtttagtttcgtctgtggcattttatactgttagctagtctctttttcattgtcagtcatgacactgcatacccctggttctttcctactattctgatcttcccttttgacttctttacttatcttctctctcccttcctcttaacaattgtttttagggttttgtccttgatccttttatattttcacttcgatgaaatcttttaattgaagatatccagatttatgccatcattcttgacccttctttggagccttcctgccttgatcaatatgtaacttaaagtcagcatctctaaaacatatctccccttttactgttccacacttgaactcttatttcttttcgcacttaataaaatcactgttcatctaggagcataagccagataactacctgtataagtctttctcaagtctttttgtttattcagtatagttaggactggagtgtctgtaatcatcatgttccttttgaactctttacttttcaattatattgaagtacttgctgttccctaaacacatcctgtggtttcatgactctgtagcttttaatatgctgttctctttgcctggaaagtcctagtaagaattatacagacttggatatgaatcctggcttcaccattaacagctatgtaaccttggtcaacttaattagcctttcaagtacctgtttctttatttgtaaaatggtaataatatatactttaaaaaagtattgtgaaaatcaagtgtgaatatgcacatatacatgcatacatattatataacttatatacaggtatattaatatgtacaatagttaattatgcatatacgattacaatgataatatatactattaaagattaaatgtgtatatatgcttgatatggtgctgtttaaatactcattttcctctttttcttacctttcctctcttgcaagctctgtgtcatatattaagcttaccttaggatcattagttttgtgaagtcttttttttttaaatatgatgtaatccttttcttcactgtacttgtattttaatcttccaaatcttttatgtgatataaaagtttgtatcttttctagaatgtgagctttaggattgggaaactgtcttgtttatatttgtatcctctttaataaaactttgaaatagcatcttatgagacccctcaagttaagtacagaagtcatgcacgtataagtatatagactttcctaggagagaagttcataacttcttttagattctcagagcaatctattcttaaggtgaagacttactggcctagattttgatgcacaaaacaaatattccactgaactaaaccatgcatttcctgaccctgggaagggaggcaccagctcctttctggttctgaatcactttggtgggagagtaaatggaaagctgctgatcccactcctcactttcctgactcaacttttggtcctccagctctttcaattatgattttgtaattagaaatttccctatattaaatctttccacttgaaatttctagggaagtttgtctattccactaaatccttttttttttgtactagcacattataagttttggttgaattaatagaatattacatgaaaaaatgctagaaactttatttttctttctgtaaagcatattctcatggtgctggacagattaaaaaacaatatattttctttgtaatatctctgtgtatatatacgatgcagtgttcatacacttttgtttatgcagtcgggtgtggtctaaaatatgataacatcatatctactattttagatatagctcatatttatctgcctccttcatttgagtagttgagaatataaacagaggaaatggaattaaatctccaaatgtatttgattctttttaaaaatttgtctcaaaggcactctgatatgagcagagtgtcaccttttaaaaagtcagtgtacagactagaacagaaagtacacaattcttttctcctgtatttgatctatttaaactagcagtcatgcttgtattttgataatactataagattttagtagaactttttaataatcttatacagttgaataaatcttttatgttttatatgtgaagagaaaaaattatttttgtatattactttcaaattcttctactcttgtaactatttcttataggtctttcacttttttttcctgtatacatctctgatgtttggatttaccatctgagtgtgttttatggtttaattcagtctgaaatactgcatttacaacatgacactagctgtaaaaacattctgtctgtgaggtaataactgatcttactgtagttgtcatttctgttgaatgagtaatatataatatagaattctttttatagtctatatgtctataatggtgatggattagatcttggattagaagaacatataggtaaatgatttgtatacctttgtaaatacccttctattaaagataattgctaattaatgattagtgagttactaaaccttttattgagatatactgtgcagcctgatgcagtggctcatacttgtaatctcagcactttgggaggctgaggcaagaagatcacttggggccaggagctcaagaccaaccggtgcaacatagtgagaccgcgtttctttaaaaaaaaaaaaaaaagccaggtatggtggcatgcatctgtagtcccagctacttttaagtctgaggtgagatgatcacttgagctcaggagttggagactgcagtcagccatgattgtaccattttattctgtctttggtgacagaatgagattctgtctaaaaaaataaataaataaaaagatatcctatgcaatatggctttctgtttgagacttgtactgtccatttttttccatctctgtatgtcttcatttatcaattactttttctagaaagtgtttgaagcattgatatttggcagtagtctatttggtcttaatgctatttagtcttaataaatttggaagtttttattcattaagcaattttaggaaagatttcagtatcattgttgtatggacatggtatttgtatcagtcatggttcaaccagagaagcagacccagtaggagatacatgttataaatagttagcttacatgagtgtggagctgactagacaagtctgaaattcataggctgttccatcaggaagggcgggttagaacccataggcacaggttgaaactgcagtccacacacagaatttctcctttactagggaagtctcaactctgctttttaagacccttcaaatgattgaatcaggccataattatctagggtaatctcttacttaaagtaaacttattatggactttaatcacatacaaaataccttcacagcaacatctagattagtgtttcattactagcttatccaagttgacatttcaaaaggctatcacagtattcttattttcttttgtgtatgtgtatgtttctctgaatctatttaagtataggttttgctataataattattatttttccttagtctgccattagcaacagtgttgttagagtagtgtatagaaagtagctgacataattaaaagggaatgattttaacccagtcttttgatcttgtttctgtttttgcagttttgtaagttttcagaaacttgctgaccattgttgctgaaaggacatacttttttggtttgacttatcccatagtaccttggatttaatgttaacagtgcgaaaatctgtttgaatatttctcctatttctcttatctgtgcatgtatagaaaagacttgtaaactgttgaattgaaatattgattgaaaagatattttaaaagataaaggagccttctgaatatcataacttaaaggtagaaatgtacatatatctcaggtaaaagacaaaaaggataactaaaagaatgaagatgaactttactcagaatatttacaatgaataaaatacagcctcacgtactaccgttaagttggtaatgcgttttatttttcttaccttcgataatttccaccatcctaccaatacaaaacatttttttactccaagttaaatctaattaagatgatttaaggagcattgggggataatgatgctatttattatagaagctgactactctgtgtgcttttgcataaccacagcttagctaccacttataagtgagaacatgtagtatttgttcttttgttcctgacttacttcacttagataatggcctccagttccatccaagttgttgcaaaagacaatatttcattcttttatatggctgagtggtattccatggtgtatatataccacattttctttatgcacttgttggttgataggcacttagattgattctttatctttgcatttgtgaattgtgctgtgataaacatacacttgcagatgtctttttgatataatgattccttttcatttgggtagatatcctctagtgtgattgctggatcaaatggtagctctactcttagttccttgagaaagctccatactattttcataaaggtagtttaatgaggttcaatttatttatttttgtttttactgcatttgcatttgggatcttagtcataaattctctgcctaggccaatgtccagaagcatttttcttaggttttctcctagaatttttatggtttcaggtcttagatttaagtctttaatacatcttgggttagtttttacatatggtgagagatagcgatcccgttttattcttctacatgtggttatccaattttcccagtactatttatttaatagtatggtgtcctttcccaaatttatatttttatctgctttgttaaagatcagttggttgtaggtatttggctgtatttctaggttctccattctgttctattggcctatgtgtctacttttgtaccagttccatgctgttttggttactatagccttgtagtataatttgaagtcaggtaatgtgataccttcagatttttcccttttgcttaggatttgtttctttgagctttttttttggtcccatatgaattttaggatttttttttttttttagttctgtgaaaaatgatgttggtattttgataggaattgcattatatctgtagattcctttggggagcatggtcattttcataatattgattcttcctatccatgaatatggtatgtttttccatttgcttgtatcatctatgatttctttcatcagtcttttgttgttcctgtgtagatgtttcatttccttggttaagtatattcttaggtattttatttattttgcagctgttgtaaatgggattgagttcttgatttgattcttagcttggtcattattggtgtatagcagtggcacattttttttgtttcatgaaagttaatggttgtgtaaaggttgagtatcccttacccaaaatgcttgagactggaagttttgcagatgataagagtttttcggattttggaatatttgcatatatatagtatttcttggggatgagacccaagtgtaaacatgaaatttgtgttttatgtatagcttatacatatagcctgaatgtaattttatacaatattttaaagattttttaaatatgaaatgaaattttgactgtgacctgtcacatgggatcaagtgcagaattttccatttatgatatcatgtggatgctcaaaaagtgtcaaattttggattattttagatttcagggttttggattagggatgcacaatctgtgttagtaatgaatttagtgggggtatgtttgtctctgccaggcatgctattctttttcagcagtgagtgtgtttgacatggtctggttcttctgaaatcagatttctcttgtagcatatttaacaggaatttctaaagtgtttcttatataaggatagcactctttctaattgtaaacattcatgatacagcctttcttcttctttttttttatattgagtaggtttttttccattggagtattggaaaaaaggagttttctaggcatgtacttcttgttatatggaatactgataaactttgttttcttgctaaaattttagtgtgcacaggtagcttttgaagatgtctaatgcaaattaggctttctggactgtctagcaccctttgctttcaccctttgtgattatacttttttgtatttaatgcatatctatagaaatagtgattgttggccgggcatagtggctcatgcctgtaatcccggcactttgggaggctgaggtgggcggatcatctgaggtcaggagttcaagaccagcctgaccaacatgaggaaaccccatctctactaaaaatataaaattagccaggtgtggtggcacatgcctgtaatcccagctactcaggaaggctgaggcaggagaatcgcttgaatccaggaggtggaaattgtggtgagccgagatcgcgccattgctctccaacctgggcaacaagagtgaaactaggtctcaaaaaaaaaaaaagaaaaagaaatagtgattgttagccagtccttctccatctccttaaatacgaccagatattacttaggtttaatgaattgtatatgttgggatgaaagtagcatgactgtattcgtggtcaacagtgaggattaaagataggctgtttactctgagatatattctttctttttttgcctagtcgttggactaccacctgtgaaatagcgtatattaactgtctcttcctacaaacattctaatgaagtaaggtttttactatgtgaaacataactctctttgtatgaactcaacgttttttgaggaatattctctaaacggaattctagtatggagggttggtggaaagagcactgcttttaggaatcagaaaatgtccattgtagtcttaatctgttaatgtttgacaggataatttaggcaatacttgattttttttagaacttattaattgtaaaatgtgaaaatggagaggattgaaatggttatctaaggtttcttctatatgctgtctcgtttgcagacactgggatgtcataaccaagtgagaagtttttcagagtttctctgaaggggctttcgagatgaacagttattttcttgttgaatttgctcctgttcgaggttggaaactgaatcttgcagactcactaatctcattttatcactatattgagaataaatccacctctcagagacaagctaagcttatgaaacttaaatatgaagcctgaatgttaagttaatttacaaggagaaatttctgtgccagagactggaatactcaaggtccattctctccctacacgcagaacaaatgttaagtcatattatgatcaaaaggtacataatgagcttggaattggaataaagagaattaaataaatcgagtttaatgatattgcagcaatttgccaataggactggcaaaatttaaaatgttggcttaagtgccctttctctggataatacttagatgaaccctgccagtgtttatctgtgtttctttatttaaatttatttcctttatttaagtttctatggctgatttcccaatctttctgattgatcttattatttatctaaatatattaactggataaattaatattttgtattttagtctttctggcttgggaatagctagctctcctttatttaggagactttgcatatctatgttttgatcacctatttgatgattattctgataattttacttcgtaaagcaattcgcaaatcattataattatttatcataaaacttttaaaagaaaaataatgttgttctgctcattttttaaatgaggaacctaaggctcagtgtctaccctggagtactgagctctaatgtagaactgggatgtgaatctagttctcaaatccaagttctttttctacagtatgctttctaattggaagtggcttgagtcaagggaacacaaagagctaagtatatatttaaggtattttaaacttccaataaagaagttttttttttcttatctaagttataccttcatagacattaaaataaagcttctttttaaaaaacttttattttaagttcaaggttacgtgtgaaggtttgttatataagtaaacctgtgccatgggggtttgttgtacagattatttcatcacccagatattaagcctagtgcccattagttatttttcctgatcttctccctcctcccaccctccaccttctggtaggccccagtgtctgttgtttctctccatgtgttctcatcatttagctcccacttataagtgagaacatagagtttttggctttctgtttctgtattagtttgctaagggtaataatggattttagctccatccatgttcctgcaaaggacatgatctcattcctttttatggctgcatagtattccatggtgtacatataacacatttttaaaatccagttcatccactgatggccatttaggttgatcccatgtctttgctattgtgaaatgctgcagtaaatgtacacttgcatgtgtctttatgatacaacaatttatatttctttgggtatattcccagtaatggggggactattgggtcatatagtagtttgtttttagttctttaaggaattgccacacagcgtttccacagtggttaaactaatttatactcccaccaacagtgtataagtgtttctatttctctgcaacctagccagcatctattatttttttgactttttaataatagccattatgactggtatgaaatagtatcttactctggttttgatttgcatttctctagtgatcagtgatgttcagctttttttcatatgcttgttggctgcatgtatgtcttcttttaaaaagtgttcatgtcctttgctcagtttttaatggggctgtttttctcttgtaaatgtgtataagttccttatagatgttggatatcagatctttgtcagatatctagtttgcaaatattttctcccattctgtagattgtctgtatactgtattaatactttcttttgctgtgcagaagccctttagtttaattagatcccatttgccagtttttgcttttgttgcaattgcttttggcatgtttgtcatgaacactttgcctgttcctgtgtccagaatggtattgcctaggttgtcttccagagattttatagttttgagttttacatttaagtctttaatccactcttatgttaatttttgtatatagtgtaaggaaggggtccagtttcaatcttctatatgtggctaactagttatcccagcactatttattgaatagggagtcctttccccattgcttgcttctctcagctttgtaaaaaatgtgatgttgtaggtgtgaggccttagttctcgggtctctctcctgttccatcagtctgtggatctgtttttgtagcaatagcatgctgttttggttactgtagtcctcctgtagtacaatttgaagtcaggtagcataatgcctccagttttgttttctttgcttaggattgctttggctattttttggttccatatgaattttcaaataggtttttctagttctgtgaagaatgtcattggtagttgaatagcaatagcattgaatatatgaattgctttgggcagtatggccattttaatgatattgattctttctatccatgagtgtggaatgcttttgcatttatttgtgttatctctgatttctttgagcagtgttttgtatttctcattgtagaggtctttcacctccttggttagctgtgttcctagttattttattctttttgtggcaattgtgaatgagattatgttcctaattttgctctcagcttgactgttgttggtgtaataggaatgctagtgatttttgtatattgatattttgtatcccaagacttcactgaagttaccagcttaaggagcttttgggtggacacagtggggttttctagatatagaatcatgttgtctgcaagcaggaatagtttgacttcctttctttttatttggatgtactttatttctttctctttcctgattgctctgtccaggacttccaatagtatgttgaataggagggatgagaaagggcatccttgtcttttgctggatttcaagggaaatgctttcagcttttgtccattcagtatgatgttggctgtgggtttgtcatgtgtctcattattttgaggcatgttctttcaatacctagtttattgagagtttttaacatgaaggaatgttgaattttatcaaaagcctttttttgcatctattgagataatcatgtgtttcttgtctttagttctatataggtgatgaatcaatttattaatttaagaatgttgaaccaaccttgcatcccagggataaagcctccttgattgtaggtttttgatgtgctgctggatttggtttgccacaagtgtttttgcattgatgttcatcaaggatattggcatgaaataattatttttcgttgtatatctgaaaggttttagtatcagggtgatgttgacctcatagaatgaattagggtgaagtccctcttcctcagtttcttggaatagtttcagtaggaatagtaccagttgtcctttgtacatctggtagaattcagatgtggatatgtctagtcctgggcttttattggttggtaggctacttattattgattcagtttgcgagcttgttattgatctgttcaggaatttaatttcttgctggttcagtcttaggagggtgtatgtgtccaggaatttatccatttcttctagattttctagtttgcatgcatggaggtgttcataatattctctaatggttctttgtattcctgtgtggtcagtgataatatcccttttgttgtttctaattgtgtttatttggatcattactttttttcttctttatttgtctagctagtggtctattttaccaattttttcaaaaaaccaactgttggattcgttgatcttttgaattttttttttttgtcccagtctccttgagttcagctctgagtttggttatttcttgtcttctgctagcttgggggtggttttgctcttggttttctagttctcttaattgtgatgttaggttgttaaattgagatctttctaacttctttttgtggacatttagtgctataaatttcccttttaacactgtcttagctgtgtcccagggattctggtatgttgtatctttgttctcattagtttcaaaagacttcttgatttctgccttctcttcattatttacccaaagttattcaggagcaggttattcaattttcatgtatttgaatggtgttgagcttttttcttagttttgaattctatttttattgcactcacatctgagaatgtttgttacgatttcagttcttttgcatttgttgaggagcattttatgtttgattgtgtggtcagtttcagaatacatgccctgtagcgatgagaagaatgtgtattctgctgttttggggtggagagttcttttcttttcttttttttttttttttttttttttgacgacggagtctcactctgttgcccaggctggagtgcagtggcgcgatctcggctcactgcaagctccgcctcccaagttcacgccattctcctgcctcagccttccgagtagctgggactacagatgcccgccaccacgcctggctaattttttgtattttttattagagacagggtttcaccgtgttagccaggatggtctcgatctcctgaccttgtgatccacccgcctcggcctcccaaagtgctgggaatacaggcgtgagccaccacacctggcctgggtggagagttctgtagttgtcttatcaggtccatttgatccagtgctgagtttaggccctgaatatcttagttatttttttttgctttgatgctctatttctgtcagtggggttttgaagtctcccactattactgtgtgggagtctaaggctctttgaaggtccctatgaccttgctttatgaatctgggtgctcctgtgttggtcgcatatacatttaagatagatcttattgaattgagccctttgctattatataatgctcttacttgtctttttggatctctgttggtttgaagtctgtttttttctgacataaggattgtaatccttgctttttttctgatttccatttgcttgttaagagttttctccatccctttattttgagcctatggatgtcattacatgtgagatgggtctcttgaaggcagcataccattaggtctttgttctttatccagcttgccactctgtgccttttaattaaggcatttagcccatttacattcaagcttagtactgaaatgtgtggatttgattctgtcatcatgatgttagctgtttattatgcagacttgtttgtgtggttgctttataatagtgtcactggtctgtgtacttaagtgtgtttttgtagtggctggtccaaataaagctttcatcaatgcaataggagccaattgttttttatattttgttcattgtagatgtaggatcatattatagttaaattatcactttttaaggagttaaatgctgaatattctaaatttctgattgatatttaccttaaagattagtttgtgaggcttcatacccaactcatatgttttttaaaagtatgctatattttagcattggtatttctggttaaaatgttaagttttttgtaaattttagttttttatgtttatcaagaggtataactttggtattttactgtactcttatggcagaacattctttatatgaaggtatttcctcaccaccatatccttgttttttttactttgaaaaaatgttaggttggtgcaaaagtaatttctgttttggaccatgaattttaaatcattataactaggcttgaaccatctttattaagcaaattaggaagcattacaatcaacacatttttgccaacaagaaacaaggttgtttattcctgtagtgtaaaaatccatgcttcaggattcagtaacctcttggaaagcattttctgcaccctgctggttgtggaaatgttttccctgaaaaagttgttgagatgcttgaaaaagcggtagttggttggcaagaggtcaggtaaatatagcagatgagacaaaacttcatggctcaattcgttcaacttttgaagcattggttgtgcaacatgtggtcaggcattgtcatggacaagaattgggccctttctgttgaccagtgctggctgcaggcattgtagttttcagtgcatctcattgatttgccaagcatacttctcagatgtagtggttttgctgagattcagaaagctgttgtggatcataccagcatcagaccaccaaccagtgaccatgaactttttgtggtgcaagtttggctttgggaagtactttggagcttctttgcggtctacctactgagctggtagttgccagttgtcatataaaatccactttttgttgcatgtcacaatctgattgagaaatgattcattgttgttgcatagaataagagaagacaacacttcaaaatgatgatttttttgattttcgctcagctcatgaggcacccacttattgagctttttcacctttccagtttgcttcaaatgctaaatgactgtagaatggtcaacgttgagttctttggcaacctcttgtatagttgatcagccttgatgattgctctcaattggttgttgtcaacttccaatggccagccactgtgatcttcatcttcaaggctcttgtctcctttgcaaaacttcttgaaccaccaatgcactgtatgtttattagcagttccttggccaaatgcgttgttgatgttgcgagttgtctctgctgctttatcacccgttttgaactaaaataagaaaattgctcatatttgctttttgtctaacatcatttccatggtctaaaataaacataaaataaacagcaggtaatatgtcatcagcaaaagaacataaagtgagaaatgcccattaaaatgatgtatgacataaccacattaatttaagaatgtgttccaacatcaaacagcgaattccaacaatgcaaaaactgcagttactttagcaacaacctaatacaaatgaaagtctaccgttttcaatttatttcacccttatggctgattaactttaatggatataataacaatagaactttatttaaactacatattccttgtaaatttgggcatataaaatttcttggaggtcatttaagagtttaggtgtctaatagctgctatttcttttaacctgcttgaaaagaggagataatgacacctaacattgagttgagagttggagtctttagtaggctcaaattttgcttttgagtccctgttatgggttgatggcacatgtgtttaggtatctagctctaagtatatgttggtgtgatgactaagtttttttttttaataaatagtattttcaccatattaatataaaataggctggtcttctgctgttgaaactattatgattatcaaatttataaaagccacaagaatgtagtatataaattgtcaggtagacgtacattgcctttgttaatacttaaatagagtactctatttgggtagtacccaatgcttctcaaactgtagatgtacacttgggcaaagtgccctcaaaactctaaagtgaataattctgtttatgtacaataatacttacgttgtgtgtactctggaaattattatggggctgtttatgtcattttaggatgctgagtcagcttctggcaaatggtatatttgtaatctgacaactgtcaataaggtgctaaaagtctttttcatagatatttctattttatgatttaaataacaggcaaagaaaagaaagaagattttaatttcaaaatacatagtgattaagtcaaagattattaatatacattataaaaagattaacagcaagagtgtcttgggcatatagatagaaaatagaacagaagaagctcattcagagaataagacataaaatctgcaactgaagaaaaactagcatacatagaagtaagagaactgaaaataatcttcgtagcttaaatgaatgcaaattgtggcaagctttatattgaaggttcaaagaaagagaagaaagaacaaataattgtgtttcattttgctaatattcacatactgtaactagatttcctattataattaactggatgggcagaaggggactttaaagtagttttgttttacttcattaagtcttgttttctactggcagtaggatatagttaagagcttatttgaggactgttgcttttattttattcttttaattggcattgttaaatcactgtatatatgctagctagtcatgttttgctttctctttaggcatttaatgatagactgttgttggtatcaattaaatatatactttatgaaaacattagtttcttaaaattctttttgaagttttcatctctctgtctctttttaacttatccttttcctatttggttctctgtagtctgtttccttgtctgtatttttttttttattccaggagatggggtcttggtctgccacccaggctggagtacaatgatgtgatcatagttcactgcagctgcgaactcctgggttcaaaccatctttccacctcagccttcccagtagctgggacactgtgctcacctccttgtctgcagtgcgcctggctccttgcctgtatttttcattgtttttttaactactggaaaaataacacacacacgcccaaaatcttaacatgattttaacttgcatttttagtacttgtggagtggagaatatgagcttgagatttagagtaaaacagacatgaactctgctcgtgacttgacagtcttctagtttgtgaaattttgtactttataattaaactcagaatcttagattcttcatttatgaaatggttgttatagggaggacgaaataagttgacacacacacaaaaatactgcacagcacctagaccagagtatgtaccaggtcaatgacagttctctccgcttttttcatttcacttaacagaaatttgagctgttctttttggtcattgataggctttggctctgtgtccccatccaaatctcatctcgaattgtaatccccccatgtcaagggagggacctggtgggaggtgattgggttatggaggtggttccccccgcatgctgttcttgtggtaatgagttctcacaggatcttctggtttgaaagtgtcgcccttccccttctctggctctctttctccttctgtcttgtgaaaaaggtgcctgcttcccctttgccttctgctgtgattgcaagcttcctgaggcatccccagccatgtggaacagtgagtcagttaaacctgcttcctctttttttttttgagatgggatttcactcttgttgcccaggctggagtgcagtggcacgatttcggctcactgcaacctctacctcctgggttcaagcgattcccttgcctcagcttcccgagtagctgggattacaggcaggtgccactacacccagctaatttttggatttttagtagagatggggttttgccatgttggccaggctggtttggaactcccgacctcaggtgatccacctgcttcagcctcccaaagtgctgggattacaggtttgagctactacgcttgacctaaacctgcttctttatacattactcagtctcaggtagtatctttatagcaatgtgagaatgaattaatagtcatgtaaaaaaagatattttaaaatgaaaactattcattgtctacattcagcacaagtttcagggttatctgattctagccctgttcattgtctttgagttattttatatttacagctcttcatatgttgtaggaactgatagacatgaaattctgattgactctgcacctttagaaaaaaagcagttggacctccatttgcaatttatttcaatatttgttcactctctataaatttgtcctattttaaatgatttttcctttgaagtgattataacatttgcctggttccctcattgtgtgagtagactaaaatctttaatatatatctactttatcgctgtgagtcaagactttatcttttttttgaaaatcatgtttttatatttaaaatatttccaagaaatgtcaaaatgaaaattttaaattgatttattgaacacctttgatatacagcacactaatattttaatcatttgctatttggagtgttgcaatagtgatattaaactacaaacaatggcaagtcgttccatgacatctgacaactaagtactttagataataatttatttattttttattattttaataccaatgtgataatctcagggtaaagttttctaatgtaaaggattgctctgtatcttacattacatagtgtcttgaatatagtgctactctacgattgtattttgaataagtgattagataaatgagtccaataaagaacacaggcactgttttcttaagtgtgtcattatgttctaatgagtttaaaaaatttcttaaggatctagtttccagagactcaggaaccaaaaactacctcagcaggaacttaacattttaaaatgatgtgttcgaaatgtatcactttagcttaaggtgtgatataatttttttcttgcacttcagaaattacttagaattttgttcactcagtgtgagcaagagttaaaagaaaaaagccttttatttttagatagtaaatttggataaaaagatactatgattttggaatattcctcccatattcttcaaactgtttagactccttatatcattttttattgtattttacttcattagtttatttctattttcatttatttttggatgctgtggtattttcttgctgtgatattaaagaagcagtggggaatgaaatttttttaaattttattttttaaattttttattttttaaattttcccattcaaaaagttacatttatatttatgtttatattatataattttatgttgactatgctagcaaaagattacgaggcctcttcctctgcatctcttttagaaatggtaacagttttttttgtcatttgcagaattccgaaatttgattattgcaatttgtagtatacagggttacccaaacagccctctggaacactgttattcctcaaagaagcgagtagaggtggagtctttgtttatagtatgccaataactctagaaaataattaaaaataactaaaatggtagacattttatcaatgatgtaatcattttattaaggaagtgatcatttttatttcctatgttcctccatcttggccttttaaaagctattatatatttttccttcaatttccaacctagatgtcttagatacatcctaaaatccattatattacatctatatatctatacatataatgtataaacatatacattatatatcaagggtcatttcctgtgagtaaccctccttggatagaaacaaggattttctaaacactgactttcaccattttctgtaaattttaaaagaaatgtgtacacttagtttcaaattttttttagtaacatcttcatatttagatatgtgatttggatctccataagcacttgcaaattctttgttttttcataacagtgatttccctacatgagtgattttcaaaggtgtcagcaatgagcattgaataggaagatgtgggttcaacaacatagacctgaaaatacatttggggatcagaggtgagatgacagtttatgaaagcagatagtcaccagcctctaatgtacctaaaagatgaaagaatgggataaaaacaaggacctgcattggataatagggtgtttgaatgaaaattaaaggtcaaaactattttctgagttacaagatataaaaatcattattttattggcatattcttcttgaattattttaatcattaacagagataaacagatttttttggggggtataggtaaaagtgcatggctatttttacccatttcttatttagaattaataagagttattatgtttatgtaaaatgaaacagaaatgaccacaaacagaattactgggaaaaaaaattgcacactgtttggaaacttggtgctccttcgcctgtgtcatgttttgacatagttagctttttgtgctttagaagagatctgtcaatgaaaaatgatatgtccaagtgacttgctagttacccttacaaaggtaaaaatgaagaactgccattcattgcacttttgatttgctttgtagctgtgaaggaatattgtgctgacttatattctctaaatcttagaacaccaaggatttcacatttaaaataaagcaaattgtatctatactctgcttaagcattaaaagcaagcaaacaaacaacataccaaaagaaacaaaattttatagatttctcttaaaaaattttggctgtgtttttgtggaagtaggtgttgttgggcacacctgatttcctgcatttaaagattttgggcatgaggactgacattacacgatttttaatagaccaaagaatactgtaagcactttggaactttaaaaattgcaccttgactaagtgagaagatatttatattttacatactagaatttgtaattttaaaattatgtttacaatttcccatttattaagcacacacatttaaaacatgtataccatcgttactataaaataacattttgtgtctatatacgtggacaatatttactaggacagattttcttctaagggttgaatgttatagggcagtcaccttaaattagtgaagctatgtgaattgtagcatagcaaaaactgtagaggtttaactgaaaaaaatctagttctcacttagagggaaataatatgctctcttttctttcacagatgctatttgttttctcattttatattaaaaattggatttgggttatgaaacacttagtaaacatagtatcaaattcaacaactttctgaaaattcctctgatgcctcataaattgatagtgcctatgaattgtaagcactttacattcaacttttcatatgtcttattggtctgattagcaggatgccagaaaggcttgcatctccaaattttgtgtttattggtctgttgctgattgttgagtttttttttttttttttcccccccacaaaagctagttggcccctattagtctttactttgaagctggatcttttcctatcctattaactcagagcatgctttgattgggggttaacgtgactcctgggggttgattatttcaattaggtaggatattgaaacaaaagtctttagaagtatatttttaagcaggtatagttatttttttattttttctttgttgtatttaaaaataacacacctgaatctgctatttaagaactagagtgttaaccaatttcataatttttcttctatcctatccctttgcctttgtccctagaggaaccactgtcctccattttatgttagcatttccttgattttgtaaaaaaaaaacaacaacaacaacaacaaaaaattgtgtgtgcttgtgtacacatatatatatatataagagctttgcttgtttatgtgctttataaaaatgggttcatactgtttgaaatcttcaggatttatatttttaacccaaattttgtctctaagattcagtcatgttgtttcatatatctgtagtttctttattttcactgataaataattgattatgccacaactcaggtacccatcttatgtcagtatttaggttgttgccacttgtttgctgttatgaacagtaactggtggaaactttctgatatatatttttagtggtagcaagtctttctttatttagcagttttgcctagggaaggattttgtggagaccaagttatttttcctctggtgagtaattcttgagatgtgttgtttcttttttattatataatttcccctttgctgtttcctctttacttttattgtgacttacagaaaaccttgaagaaatggacaaataattcccatatatccttcattcattttcttcaaaggttaacattttaccacatttgctttatcattttcttccctttccttctcatttttcttattctcctcagtatttatttagtgttctttttgttcttacactgaggacattcaatcaaaatactatgtcccaaagtaacttgggttagttcttacccctccctctctcatactgtgttatgtgatcaggttattcatttgcaagttcatttgttgttctttgtattctgttttaggatttctcattcccctgcctgttgatttcatttttcttttattgagtatgtgaaacgttaacatggtgccaaaagttgagaactgtattaaaacctatattcagagaagagagatttcttgccattcatttattatctttcgacctcattcctgccgatcttccactatcagtcctgtttgtttttggctttatccttcatacatttcctttacagcaaataagtagatgtatgtatctttgtcttttcatatatttaagggccttttgtatattttcattttggtaaatcgttcacatcttttgctcattgtatggatattttttattccctcaacctttttttccctctaggttttaaatgttctttatttattaggaatattggcccttatctgtgatacatgttatacatattattgttttccccaggttttaaatgttctttatttattaggaatattggcccttatctgtgatacatgttatacatattagttttttttctaagttgttagttggtttttatatttgttttgacagaaaaaacgtttaatatattatatgatgaaattagtcagtctttccttgtgttgtatctataatcaagccatagttagaatgccctttcttatgtctaaggtaaagaagaactcactcatgttttctcctagggtatatgatctcattattagactgtttagatccctgatcctctttggagtttctttttgtgtatgatatgatataagggtttaattttatttaatacttttttccaaacaacgaatcaattgttctatcactatttattaacaagcccatctttgactcagtgatttgaaatgctgcttttatcacatacttgcttcacacatacttggatctatttttggactttctgatgtgttcttctgatctgttaattgctgtgccaaataatataccatcttatttatagagattgtataacataatttaatacagcaaattttgataaatagtatgttttaatatagtttaatttagtatattttaataagagggaatggtattcctcatatagcttttctcttttagggttgttctgttctctcaagctcacttttttaatgtcacatttaatgcccatttatctaacttcattataaaaaacttattgggattgtattaagcctatacattaattaagagaggactgggatttttatgatatttagatgttctatcctattacaagagatatctttacctttgtttaggtctatttctttgtctttcaggagtgttttaaagttttcctcacatttcttgctaaatttattcttaagtactgtattgtgtctttgttgcagtgaaaaatacttattttctttaccattacattctctaaatggttattgtttttacatatgaattatattggtttctgctggtcaagtttatatcctgctgctcttctgaatgcttttattattagagttaattttatatgtattctcatgatagaaacatgaaattattttcaccttttttctttttttatggtgctatttcatttctcttgttgacttgcattgatttgtgcctttagtacaatgtttaaagatagagagttagtaggcatccttttcttattcctcatctttacggaaacacctttaatcttttcccattagttaagttgctgcctttagggctgaggtttatatattttattttcttaaaaagcgtccatcagtttctattttctgattgtttttaactgaaatgggtgttcagttttatcacgggcatttccagagtctggagataatcatataattttttttaaaattctgttattatggagtattatattaatgaattctttaataggtaaccagtcttgcattcctggagtaagttctattggttcattacatatcattttaatatggtgctggattcatttttttaatattttatttagaacttatacttcattataagtgatactctaatctgaaaatcttgaatttttctgatttttaatgtctttataaggtgttactattaatgttatgttaattgtagtgttaatgaaattttccttcattttcagtgttcttctcaattttagaatattgggtttgtataatgtttgaatttttggtagaaatcctcttgaaataatctgagcctgatgctttctttgttgggtagttgcctatttttttcacagaaaatttatttttaaaagttgaaaaaaatatttaatcagatcaacttttagaaactacatttctttaggaattttttcatttttctaaatgctttgatttacttagaagtctgtagaagagccttattgcttactaattttttctgttttgatagctatattctccttgtcatttaattttgtatatttgagttctttcccttttattgttagttactattttgtttaattttcatttgaaattcaggattttgattagttatatgtacccttttttcttactaatctacttcaatgaatgcagtatctttattattttccttattctactttttaaattttcttttttgtttcttttttagtttgagctcggaatttaattcattgttttttaacttcagggctatgaagtttgctttctaatcactgctttaaatgtatcccatatattgttatgcaatggtttgtcactatttcttagaaatcttatagtatcttaacagataatgaaaaattagaattatattgtgcttgggtgaataatgggataggtgtgaaaagatttctggaaaagcttgttttgaatgttgccaacttataacttcaatgacaacttccatttactgaatgtttagcatgtatctgtcactgagctctaggtggttggtatgcattatctcatttaagctgtataacatcattttgagctacctattatttccccattttcacaagagcaaactttggcttagaagagttattgtaatttgcctaaggctgcataatgcataaattgttaatgtttaaatttgaatccatttcttatggcttttacctagacaataatattgtgaggtcacagaggtcagtacctctgacggggcagagtcagggaatgttagtagtatggtgtgactggagtgaagttagcacttagtggtatcatttctggcttgagcaaatggttttttgatgtattattaactgagatggaaaacatgaagcaaagcaggtttatttaagatgatgggcaagcttggtatacctgttggacaactgaatgaaactatctggtagtaaggtgagtatatagatctagatttctgcagagtgatttatactggagatgtattgggtatcattagcttagaggtggtaatttgaagagtgggttttgaaagtggtaatctggaatattcagtacagtgagaagatcagaagagatatgaaataatgaaacttgtggtttattggagaaagagcctgaaaaggaatcaaggaaatggtagtcaaagtgttaggtagaaatataggagatcatgtgtaacaggcaccaaaggaggagttttaagaaaaatggagggtcattatcattctctggagaactaaagaaagataagatcagaagtgtttatttgatttaatagtatctgatacaacaagtagtatcttaaataacagatccagtggagttatgaagattgggtcgaggaagaagaaaatggagacgggttatgaactgttgaagaatttttgttatgaagagaaagggtcatagtatggtactagctagtatgtgattcagagtaccttcattccctctctctgctgtcctccttcaacctctccctttcatctctttctttttctcttttctttcttactcgctcccactcttcctgttttctacctactttccctcctttctccctaacatgatacacttgaacatttaatgttacaggatgagaatttaacttgggacagcatgacatcttatcttatgcctataaatatgagtaacataaataaatattaaaataggtgttagatcagaatgaaactgttaatagtttcttgaatacaggatcacagccacatatatacctttaaacatacttgctcaataaattttaatgataatctttgaaataataaaatatcaacactttactaaatgctttacatgttttccacaatttcaaccttatcagcaaaatctctgcccattttatagatgagaaaactgaagcacagagaagttaagtaacttgtccattgttctatacctggtatggcagtgtggttctagagtctatgctcttaatcacaaggctgtattccttctcactccactgtactagttattttcatgcctttaaaaattcattagtaatatttttgttgtaaattatgatacagaattagaagtgggaatattttgacattttgaagaactctcactattctacttgtatagaatagtgaagattagaaaaaaaataatttccgaagtagggataccaagtacaaacatcaattaaaatttcacttttctgtatttgagttaaagaattgaaatgcttggccaggtgtggtcgctcacacctgtaatcctagcactttgggaggccgaggcgggcggatcatgaggtcaggagatcgagactatcctggccaacatggtgaaaccccatctctactaaaaatacaaaaattagctgagcgtggtggcgagtgcctgtaatcccagctacttgggaggctgaggcaggagaattgcttgaacccaggaggtggaaattgcagtgagccaagatcacgccattgtactccagcctgggtaacggggtgagactccgtctaaaaaaaaaaaaaaaaaaaaaaaaaagaaaaaaaaaaaaagaaaaaaagaaatgcctatgggtgaagctagactatattaattatatagtatggcacataatatgtcaaaaatgcaatattgctaaaaatgcaatattgctacataataaaagtgtgtataagataattgaattcttagaatatcaatcacaaattgatgtatttgttattttgtttatatctaatggccttataaatgtctttcttcagggaaacatgcaattttcattgtgagctgccttccagagtttatggtagaacttcactgacgttgctgatgccaatgtggaataaaggtctttatagtttagaaagttaaaatgtataaatgggctgcaccaaaaagtgactcactttccttaaattttaaaatacataatacaaacttatttgaatttttagaaagaacactggaaaatcaagtaatatatgtacgacatgtttatcttgcttatatccgtacttttgtcctatgtcatacttgatatttggattccctttcaggacctttatatttgagctctaatcacaatctatttttcttaaagctaattgaaaaagaaaagaaaagttattatttttctgtatggacaattcagcaaacttaaactgactttattttagcatgaaaaaccttttgtttgttacaaaagagactttaatgcagatattgttggattagttgtttcaaagtaattgttctttccccttacttattttattgtaataaatattaattggttgacttgcctaccgagtcataaagccattgagtacatgggtgcatctgtattgctcactgctgtctcttcagtccctaatgcctgtgactggcactggtaggtactctagcgctttttaaaaaaattaaatggatttttctgaatgaaatgtatgaatatataatatatatatatgagtattttctctatgttggaaatgtactccttatggcactgtgttggtatgtaaacactaagactttataaaactattttgtttgcctggatcttacatggaagtgtcatgttaaattaaaaacactagttttagctttcacagattgggccctgaggaatagtcatagaatcctgatttttcactctcattgcttttactttccttacttttttcttttcctctatttcagctctctttcttcctttcaacctgttccctctctgttttctctttaataatcctatcctttttgttgttgttgtttttctttagtatctggagtccatctttcaccatcttctcctgagattgtactggaccgtgaccactcttcttccattggctgcctctcttctgatgccattatttcatcaccagagaatacacatgcagcaaatagcattgtgagtcaaactattccaaaagcacaggtaaagacaaacatatttttaaaggaggtttgcatatttaaaaaattgcctgctaatttaattgttgcttttttaatttcttttttagcctatttgtctaaaagaagtatttctgcaatagatattctaattttgaggctaatacttagaattcaaaaaaactatataatatgtttgtgtcgtggcacaattgcaaagtatttaagtagccttagttaccaaagtatgatttgagtatctcatttattaaactttacttggctttgcatttcaaatcttgaacttgaaaagggaaaataatacaaagaagaataagtatttctcttttcagcgaatcttaccgcacattttcaggtattcaagcaactatttcaattttagagtaaaaaccaaaaatatagcagttataaggtttattcattcaaatattttttaaagcaagaatttatgctagctgctgaaggtagtcccaatttctaaagtgctgtacacaattttgagtcacctgttaattttgcgagacagtggtgatcaatagaggtcattgataaatttcagagtttgatttacagtttaaaatataaacaaattctaggtctgtgtgtaaatttaagaactgttaacaaccagatatgtctatccttattcatacattttcaagcacaggaaaaagttaagtcttttagtgcattggtagcaaaataatgaatactttagatttcaaaattaagaggaaattttgtttcttacagcaaagatcgggttgttgtaaaagtttgaggtcttctcttgatttacttaaagggtgaaataatttcggaaccttttcaacaacttaatttccaaatgtggtttctagtgccctttggatgttttcattattggtatagtgtaaactttcctctcttgtgtatttttttttttatgtggtttagattcagcaatcaacacacactcatctggatatctcactttttccattgggtttaactgatgaaaaaagtaatggaacaattgcccttgtggatgattctgaggatcctggagccaatgtatctaacatacagcttcagcaaaaaatttcaagtctggagattaaactcaaagtatctgaagaagaaaaacagagaattaaacaggtatatttacatttgcctaagaaatgtttgaattgcaaatattagaaatttgatataatctcaaactctgattaaaaactcatcagaggaagaagatacttttctcccttggttgtaggtttaaagcagtcatgagcttatcacttagaaaagcctttgataagaaatatattttacatatgtacttttaaagatatgaacatcgtttactaggttttttctaactattgctttcttttttggtttatttttatttactttgaaagcaggtagtattgtgtttcttatgaggaggtgaaattttgcgacatcaacttttccctatgggaagttaggcatcacaggatatttgacaagagtacttaggtatacagccattttagtaaattctttacttatgctttcttccctgtgaatatatagcaaatttatagaaagtgtatgtagaggtagattatgttgatgaaattagttgagatgctcatattcatttgttggaatgagtaaatgttgtgtccatgtttgatattggcctagaaattagagtgaagcatataatttataatattgttagattttaagccgtacttcccatggattctttctctgacaaatgttttctgacatgttcattgaaaaaactaattatattttatgccattaaatattacaaagcttgtatttgtatttttattttaggatgtggaatcattgatggaaaagcataatgtcttagaaaaaggctttctaaaagaaaaagagcaagaggccatttcttttcaagatagatacaaagaacttcaggtaaggcgattgaacttaagatttaaaatgtaagccttttgatgaagcatgtgctataatttcaaaaagtgcataatgaatatcttatgaatgaagaatcagatacttgcttaaatatataaaactgaccaacatgggctaaattaatgggaagacacccattttgaaaaatatgagtctgtgagcagccctgaggattagtagtttgaggcccaaacaatttggtaagaaatattctgtttctgatggatacattttgggaactgtttattctaatttttgttataataattacatttgaattacatttagaatcctgtaatccagaactgagacacttaacttttttaaataaattgtctccttttctccttcctaaattttcttatttatttcttctacagtctaacctaacacagtaaatggcaactccatctttctaattgctaagactaaaactaactcattcctttttgtacttactcaatgtctgtttctttagcaggatttgttggctgtaccttcagaatatccaggtttcaaccatttatcatcatggtcagcgctattaacatattgtatattatcattatttctcccttggattactaaagtatattctaactagtcttttgtttttgtcactgcccacgtgcagaccattccccccattgcagccactgtgatctgattgaaacttaaagctagtcatgtcattattctgttctaaaaccttcgtgggcttcttatctttcccacactaaaagccaggtccttaaactggttttcaaggctctgtgttcccttatgtcccttcttcctctcttttccttgcctctttttcctcagtcatttttctttttcctaatgtccagagtgctcagattccctcagatacctgcatggttttcttcatagccttcaagtctctgttcaagtattaccttatcagataagcctttccagacaatgctgacatcctctccatccaccttatcatagtctgctttatttttattcctagcaccttttacatttgacaaattatatatttacttgtttatttgcctggatcactgtaatagtctcctaagtggtcttctggcttccatccttgttcttttccttcatgagtttttaattcagcaggtaagagtagtgttttaaaaatgtaaatcaaatcagatcccagactcaattcctattttcattccaatatacattttcaagcttctccagtttaccctcaggtatttatttacaccaagctttataataaggtataggtgaatgtgtgagtatgcgtggggaaggacattctttgcctgttggaggggtatggtccatgattcactcacatatctctgcctggaatgctgttcctcctgtagataagtttcttaaaaatacaaaacttggaaataagaaaaacgcaggcagtgtgtcttttcagtgcctgtgatgacattgtttaatgtgcccacctcaggagtacttaggagaaagtactttatttgactcactgtttattcttgaataaaagtctcagatgtagtgaagttacatgttaatttatagattttttcccctgaagagatgcgaataattctgtctgttagaaaagataacttctaagaatataattaattgccctgtaggatattaacaagttttatctctaacctagtgcttttagtccaacactccatgttgttaaatttcctatctaaatcctgttcttcacatgctgcttaaaccagtcttagcatcttattcattcggtcttataggatattaaccagtttcgtctctaacctattgctcctagttaacactccattgttaaatttcctatataaatcctgttcttcaaatgcttcttgaaccagtcttaatattcattcagtcttaagataaatgattaattcattagtaaatgaacagaataaatctttggtatatcttcaattggtatttacatgagtcagattaactttttgaaaattatacttttaacagctctcgctgaactctagcttccttctgatatttgctcaaatgctactcttgtggaggcttttcttaatcgtgctgtataaaataaggccctttgtacttgctcagcatcccctagccctttttatttttttcttttccataccgcttattcctacctgttattttattttgatttgtttattttctgtcttttctccactacagtgtaaattccttgagattaaggagttttccttcccagtagtacttggcatatagtgcatgttcaatgaatactgttggatgaattgaatagatgaactaatatcatgcaccctgctccccaaggactaattacattgtgtatagccacacttactgacctcatccttggaactatggtgctgattaaaaggcatagtactgaataatgagataactttgtgtttctttgtctccactgaatgacttattctggaccctttagtgagacatacatctttgagagttcagtttttccatctataaatgggaacagtaacatatcagagagactacgtgagacttaacgtatatcactttgggttgtttttacattaatgaccaatataaatgctatctggcattatcattgttgtctcactgcgtttactattaatagtgataatctaggagtgatgacttgagtcttcaaagctagttccttttgtaggaatcagtactttcaaagaaaacttttttcagatgacttcattttaggacctataggcttctctctcctttttatagcatgggaataaaagagtaacttacggagtgttaaacaccttggctaaataaattatagaaaaatgtaccaggaggtctcatagccaaatcgaagttaaagtaggcatactgttcagtttgtatgtcaccataccatctctgaggaaagcatttctatcctcagtcccttccattcatttgatgtgccaattctttgttttttatttggttattgtatatttcagttctaaaatttccatttggttctccttcatatcttccattctgtgcttaaactttctattctgtttgtttcaagcatgtttcataattccctgccgaagcatttttattatggttgctttaaaatccttgttagaaaaatgtcatctcagtgttactattgatagtattttcttacccaagttgagatttttctgattcttagtatgatgagtgcattttaattttatcctgcatattttgggtattttgtatgataccttggatcttatttaaatcttgtattttagcaggcctcatctgatactgtatagtttgggaaaagattaaccattttgttaatgtcaggtgcaagtaaaatgacaagttttccactcagccccctttgacaccctgggtaggagggatactgccttactcctgagataaggtgggatttcagggctcccacaggccttagcagatacatccctggctgggagcaggagaggcaccttattactgttccacgggtgccttactgtgagattaggtgagatcttcttacctctggatagttataaaagttctggcttcccactcagcttcctctgacacaggaaaggagggagagagagtctttttccttttggatggggatagaagtcctaaaactgtcttcacaaccacttggttttctctgataccacatcgaggtcatctatgggcactgcattgttgctggggcgagagtggaaatctaggctcagtactcggccttttgtgacagaggtggtttaaaaataaaggcgaaacttggaaataaggaaaaaggtgagcagtgtgtcttttcagtgtcctatagggacattgttcaataggcctacactatgactatttagaagaaagtattttgtttgagtcattgtttactgttgattaaaagtttcaaagttagggccatgcgtgtttttttttaaattttttttccatggtatttggttggtgtaggatgtttattgtctaaaagttttctgtcttgctagattgtgcctttcatggatggcccttttgttacagaggattgacttttattggggcttttgtgcctgttggtgtttcctggttgctggctattccactccccagtttgggatatatgaggctaaaagaaaactcacagaactcactgctttgtcattccttggattcccaggtccctagttagtctgccttccctctgcattccagaatcctcttaaatttgttttaataaaatgtccaaactttttagctctatttattgatagaaatagggagaagtgtgtctttttaattttaatctggaagtgggatagaaagcaaccttttaaattttagttattctttgttgtagctacatcaggaaattgatatcaaagttaaaatacattaatttgaaacaggtaactttgagtcggttttttttggaggtggggaaacaggttaatgagctcccatggagtcattctagatagaggaaggatgcataaaaatatatggataattcgaaatgggagataatacataaatctctatatctgctttatatttactaagtttgtgcatatttatgtgtatgtgttagatattctgaaagtgtattttcaacaaaaatatttacattgtactgtaaatacctgattcaggaagaatttagaaatcttaggcttccgtatttgacctttctgcaatccagttctttctgagggttatggacttctttcaaactaacacaaagtcgtttctacctaataatttcttaggaataagagatgtgattaaatttgtgagtgtcaaaggaggctactgtatgttaaatatgtataggatgaaatattagcaaagtaagtttttaaatagtgatatggtttggctgtgtccccactcaaatcttatcttgaattgtagttttcataattcccacatgttgtgggagggacctggtggcagataattgaatcatggggatgtgtctttcttgtgctattcttgtgatagtaaatgtctcacgagatctgatggttttataaagggaagtttccctgtgcaagttctcttctcttgtctgctgccatgtgagacgtgcctttcactttccgtcatgattgtcaggcctcctcagccaagtggaactgtgaatccattaaacctctttcttttataagttgcctagtctcgggtatgtctttatcagcagtgtgaaaacggactaatacaaacagtgaatatatattaaatttcttgtttggatttatggtctgccagtcatcctttagataattgaatcttatttatgacatattttctgtagaatatggcaattttttaatatcaaggtatctaacatacaggtcttttaaatgtctgtgaagcttaatgaaatgaaaagagttatttatgatgacaggaacaatatactggtgcctgcatctctgtggtatcctaaataaagcaaaacatttaggagtccagtaagatattgctagattaaattagctgagaagttctttctccttaagaaatgttagtatgtgtatgtatttataaaaatagtatgtgtagtctggaaaatgtggacaatatagaaaaaggaaaacaaaatttatagctatttctcaccatgaaaattctaaatattttcacctgatttcagaatactgggctctgagttttcagttttggaaaatctactcctctacttaggccaggttttggatgtatctgtcagaatttttgtctgacaagagaaagagtaattaataaatggaatgtttgtaaaacctttaaacaaacttttaaaaaacaacattaatgattacagataattctaacagtgttattttatgtgatatggtctaattaccaggataggtggagaggcgtgaatgtgccataacaaaaggaaataaatactgtgaactctatagtacaatgggggtgtgtgctatgtccccttttcctgttctgtccagggtgtgtagcctaaccagaggaagaaaagtgagtcatgctgcatttatcagaaatagctatttaaaggactttcacaaaacttgaatagagaactcctcattttagtacaacttggattccagtcccttttgtctcctttctttgactcctgtaacaagtgggtcaacacctgtgacaagcactcaggaaacttggcagctcatcagatagcacatgtcctcatgctgccacatttctaaaaattcagttaccagacacagctggttataaaattattatctttgatagtcgtcagtattggtatctatggctaactttgggaattttttgtgtaaactttttaaagactggacttaattctttcacattccattttctattgcagtgcctcgtggctacagcagcttgattatttggcttgaaaatttaattaaaaaaaaacaactagtactgttttatgaaaataaagtgtttcagaggaccttaaatttacctataaatggatttatacagccccagactactacttacattctgttgctgatttcacagattgtattatttaagtaccagtagatattaatctaaattttttcatgtactctttaaaaataagtactaatcaggtgttggacattgggcgcttggcaagaggctactataataattgtgctttataaagttggttaaggggtagattagatcagttgcttgactacccagaatagttaacttgataatctggtatgtagagaatttagcagttatgtgtaggtaacccaaaatatagtttgcggtcttatgtaggattggaaaatgctgaaggaaatattagtacacattaagcatcacttgaagacattctgttcatttacatattttttggcatgactaaacactctgaagatgtatctttgtcagaattgtagtctgacaagagaaagagtaattaataaatggaatgtgtgtaaaaaatgaaacaataaggattttatattttagttggtcttacatgcatttcttttagtagtatattttagattagatttgatgttgggaaatgtatgtatttctgttgttaggaatcccatcctcttcataggccttataaaatgagagtcactgtgagagatcaatcattgtgagatatggtcaagtattttctttcttatttcaaagctaattgaatgattgaattattcaatccataggttaaatactaaaatttggaagacctctttgtcaaactgtattagaataataaacattgccataataagcatttacattcattaaaacatgtctatatagtgtagaaaagtttattcaaaccaaacaggtagaattatttatatagaaagaacaacatgttaagggtattttacttaatgtgtcagttgtatatatatatatatatatttttgtttttgagaaggagtttcgctcttgttgcctaggctggaatcagtggcatgatcttggctcactgcaacttccacctccctgggttcaagcgattcttgtgcctcagcctctgaagcagctggaattacaggcatgtaccaccacacccggctaatttttgtatttttagtagagatgcggtctcaccatgttcaccaggctggctttgaactcctgacctcaggtgatctgcccaccttggccttctaaaatgctgggattacaggcatgagcaccatacctgaccttgtatattcttaaaaataagactttcaggtccaagcaatgaacttgaaaattttgctttatacagtagttttcatgaatttctgcatttcatctgttttgcttcacttatttgacttccttaaattttagaacaataatcttcaatccaggatcacattatactttccaggaaagtttcaaaaaatgctaaattagtggctgacaccagttaattaatgtgttcaagtgattcaaacatcaaaaactgcatatagtaaataaagatatatagtgaaaagtctacacctcatcctctgctacatccacctagttcttttgtgccctcaacaggtaattcctgttttttttttttaatccttgtagaatattttataatgcaaaccaaggccaatgataaatatacatatatctccttccttctgtctcatttagataatagtgtactaaatatttatttagttaagattatttcttggaggccttttcatagtgactcatatagaaattcctattctttctatgaacatctgaaatacattattttcttctatcataaaacattgctgtcaaagtctaatagcaatctaattctttttccagtttcttgttatatcctgcttttggtgatttttggttgattcctctaggtttacaatatgtctttctaatatatgtagtttcaatttcttactttacagttttaagaagttattacattataaatttaatgtttgttttattctctgactgtgtcttccttatggtgactcctgttatttgtatgttggatagtctttgccttctacatttgtctttacttgactcctttttattgcttcatttctttttgatctaaaatttgctcccccttttattctttagtttaaataatcatttctgaaatgatttattctgtcataattcttttctaaaatctctcatcatttctgagttgttctaactttggtttatgttgttctttaatctactttatcattttccaagtatcttttagcttactgtgttgagtttttaatctttctttttattttatttatttatttatttttactttcagccaactcacaccttttttttttttttttttttttttttgctattcttttattttctatagggctgtcattctggtccttctttttttcatataatagcattgtatgggattcaactaatgtgcttctgttgtttttacatgaaattggttctcttaaactttttaaatgagtcatttaagatagtttttttctctcattttaaaattctgtgtttttgtctgataaaaaaaatatagtggcaacattttataattttctgacttcatttacttcttccacttttatcttgaccctctctttcttctctctctattgtctctggtttggtcaatttggattttcccagcaatttgtcctcagtgtcgggctttatctggaaagtatttagagttttttgggcccactgactccttattgaagactgcttgtacttacctgaaattgtgtagacctctctcagtttcagctactgttcttatcttggcatgctgacctctccagtgagtttctgttagccatttcagagttgccatgtctgtctgatgtcctgttacttttaccttttttcctgcacagattcggatgccatacacgttttgggactattgatggtttgtcttcacctgttcatattttggcattcacaagggatatagatttgtgataggaatatcccagtttgtgcttctattttttaaaaaatttgttctgtaagggatttttgagacatctaaaagctatactattgttaataccatattcttagattcttttccctgctgattgctgttaaagggaattatgtgtggtaagaagggttaaacacatgctttccatgaggatacttattttttatggaattagttagtagattgctgggacctggagttctcaatctcatagcaataaaacttgaaggaaaagaccatgttttctttatttttgtatactgttattaagcacttacgggtgtctgtgtctctaagaattgttgaaatgaaaaaaatgtttggagaaaaatgattttttcaagtagtttttttattgtttattttcaccttgagttttatagaaaattgatcatacatttgcctaagagccactaaagttgacaagcttcattttttattttttaatttttttagagaagatgatgaactagttttatgtccatgtgtaggggtgagtgcagtgatcacaagcatatctgtagggttaccacttatttgattctgtgcactgaaacatataacttgtatttgtacctttttttaatcagtatttgcacctttttatcagtatttgcagatactgattaccaacaccatgattgatgttcctaataagcaccttaagtcatttttctttcttcactaaagtattgatttatagaataaacatttcacttttatactgtttctcctcattcactatctttattctctgattagcagtcagcaacttaagtaaaataagggccatttcacaaaaataaaaatttatttttaaaaatgaaaatagctttaactctttttttattagaaaaaactagcttatttgataccatttaaacaatgagaagagtatacaaattttattaattttatcacctaaatattcagtttttaatagaaacaaaaacaatttattacttttctaaccatgaggggaaaatgtacaacttaataatttgattattagtacggtggttcatatctgtaatcccaacactttgggaggctgtggcaggaggattgcttgagcccaggtaaatcgagaccagcttgggcaacttagtgagaccccatttctcaagaaaaaaaaaaagaaaccaaaaaacgaaattagctgctgggcatggtgtgtgcacctgttgtcctagctacttggtaggctgagactaaaggattgcttaagcccaggagtttgaggttgcaatgagctatgattgcaccactgtactctaacctcagtgacagagccagaccctgtctccaaaaaaatttctttttcaattatttgttacggaataacaatagcaatgagaaaattaactgacattttagtctcaaaaaatgccaagaattggaggcagttatgagaattaacaatataggtacaggtttttgaaattttgtgctggcttttattttaaagggcttatgtcattttcttatccctgttctaataattgagaaaatcaaattgtcattttatttattggaactaaatggaacagttttgaagtcattgggagaatatcattttcaaaatctacaaactaattgatgccagtgagaatgtttttcttccgccttgctaccttagtcatcatccacagtagtagacatttaaagtagttgctagtacttcctcaagtccaagatgacatagatgtttaaggaatgccatcaatttactgataggttttgaggggacagaaaagactaaattatattttaataccacctaattcagaaatcttaaggtgtgatgaaatatgcatcttagacttgactcagtaagtaaaatgagtttttctgttccaaatgttttttaaggtatttagaatttgtaaacagttagtttggaaatttaaaatgtttttaaaagaaaaatcaagtaaactgtttcggtgaatttaagcaaataaacttcatgtattttagcacatagaaaataaatatgcttataaatgtaaaaataattccatgatttaagcaaattagcatcattaaacagatttgcagcagaaaaaagtattaatgccaaaaaatggattaaaagtccaccttaagtttaggtgcttagattctcatgattctgcataaagtcttttaagcaaacatctattctgtcagcagtaattccgccttggataaacctcattggctacgatactgccattgtgcaaagttaaacatttattctaaatacagttgtccctcagtatctgtgagggcttggctccaggacctctcttagataccaaaatccataaatgctcaagtccctgatataaaatggcatagtatttgcatataacctgtgcacatcctcctgtacactttaaataatctctagattagttataatacctaatacaatgtgaatgctatgtaaattgttgttatattatatcataataatacaatataataataagagaaaaagtctatatatgttcaaggttagttataatacctaatacaatgtgaatgctatgtaaattattgttatattgtatcataataatacaatataataataagaagagaaaaagtctatatatgttcagtgcagttgcattttatttcttcctaatacttttttacccccagctggttaaatccctggatgcagtacctacagatgcagagggctgactatattcacttggccatacaatttttactcatttattattgtgagagattcaaggctgtatgctaaatcttcatactttcttgcaaagttagacagtacatgacctcttttgatctacgctaataccaaggtttatgtgaatacatttcagaaatgctatgctattataattatgatactttttctatgacattatttcatctcttataaatttaagaaccctttaacatggtctttttaggaacatataatttggtagaatatggttttgatgtttatttacggttactccatatgctattaggttgtttataagtacatttatcactttagagggctatgttttatcttctttgctagatagtaaattacccaaggaacattcccagagtgcacacagacttttttttgtagtcaatacatgttttcgacaagtgcttagtgagttttttctttttttttatgtgcttaatggcaatgccacaaaataggaaaacatggacttacaatgtggctaagcctcatcctcatgcagtggtgaagcaaacctgttatttttgaatattctagtttacaatctctaaggatgtatttactgtatttcccacttatctgaggtcagactttgacctcagccattctagaacaaagccacagacctcagcagtaagtgaagactagtttgaagcaaatgcttataaaatcagtacactttattttgcaggtaagtaagtcatagagtgtctcaaccagacagttaacatataaaataaaagagaaaagatacatttgatcacagtggccagaaaagcatgttgaaggagaagacatattcagagtttggaaatttgagaaaattttggtaagggtttaggtggctcccagtgtctttgttgtctttatattcatttgctgaattttgaactttggacttttctcaggtataagtgatttaagcgatattgctatatattggtaagagttgaagagctgtactctccttttctcattgaatgtttacttgttgagaaggctgtgtgtgtttacatattctgtttgagggaagaaggacattgtggttttgaaaggaataggtaagaaatctactatgtaaaactgtttaacaatgcagagaatggtgtcttgaatggaagaatgcttatgtatagtaaatgctatttgagcattttttttgcttggtttagtttgttcattgctacttcatctttattatttagctctctatttgaaagccacttgctgagacagcctttttctgacccttctggttaaagtagttcttccccatatcccattcctcttttattttcctcaaaacttagctgaatcatacttgtttatatagttattgtttggctgtttccctttcctcccagaatgtaagttcctagtgggataaattttcttacttaactatgatattatcaactcctagaatagtgccttgcacataaaaaaaatgttgattggttgactgaaatgtgtggtttgtagactgctatggattgaatggtttccccctaaaattcgtacattgatgctctcatccccattttgatggtatctggagatgaggcctttgggagtaaattaggtttagatgaagtcattaggatggggtcctcataatggaattagtacacttataataataatagacatcagagaacttgttgtctatgtctctgccatgtggggatacagtgagaaagtagctgttttacaagccaggaagaaagccctcaccggaaaatgatcatgctggcaccttgatcttgggcttctagcctccagaattgtgcaaaataaatttttgtcatttaagctacctagtctatgttattttgttatattagccgaacagtctaacacatggagtatagctgttttatatttaaagctatagtgtattgtatcattatatatgtcatatattacatcactatacgtatatcattatacgtatagtatatatatgtgtagtgtatagtgatacgtatatcactatagtgatatacatgtagtgatgtaatacactatagctttaatttataaatatatggaggaagtttttgggatacaagcattagaaatgtttattttctttaaagctaagaaatgacttctaccctattaaataaaaatttctaggaaaatactgaatttacttttagctatagatacagtgtagaaagcattataattatgcaagatagatgtaattatgttacctactccatctgcatctaaaattacaggatagttgctagggagtctctcaagttaaagcagcatgtgaaatcacagagcagcatgaaatctgcagaatctgaagaaaagcacccttcatggcaaacattaacctgctctttactgcataggaatttgtggatatggcaacagctccagtccttcttctgctttgagacattaccaatgacctcacacatttaaaaaatccttggcctcttcttttgcttttaatttcttgaaacctttcttccctatcattttggactttttcctcacttggtttttgaagtttctcccatttttttgtagtttcttactctcaagtcataagtttccatttctttttagtatgcgtatattttctatgtgtctcaatataccttctctgcttccttatttttttctctgtcatacaaattttttgaggtttttcttaaaacacataatttttctagtaacatagtctagtaaaaatttcaaatatagaaatccataacttagaaagtaaaagatgcctataattttatactttatggataacttctagacagatagtattaacttgtcttccagaatattatacatatttatactttcaccaagaaatacatgagaatgcctgttttaccatatccttgcctactgggtattgccagacttttaatatgccagttagagaagtaaaatataacttttgatattttaatttttatttccttattagtatgttagatttttttcatatggctgttgatcatttttcccctacatttcctgtatctttttatttttaatttaaaaaattctatttatcttaagtgatttataagaacctttatatattaggattatttacattttatcatatattctggaatttttttatgttgatagctttttctacagttgatttaaaaaattaactctagtaaattttttagtaatggtgtatactgttaattattatatattttagtatataatagtataaggttagtctcttatatatgagttttgggttagaaaatatttgtctatgttcaattccggtcattttgtagtttcattttacatttaacttttgatctatctggacttcgtattgatagagtgagatagagtctaattactccttttcccacacagttagcttgttaccatgacaatatttgtaaaacagtccctcttgtcccttcttatttggaatgcatctttgccgtatattaaatttccatatatacttagatatattctagatttgatttccatttctgttgatatgtgtctgtgtattcctgtgatagtaccacctacatttctgttttattgcacatttagagatttgatagggctatgctttcttttcttaactattcttgcctgttactcttaacagttgaatttaataatcatttaatcaaggttttaaaccctgttgcgattttgatagaaattttgttaaattcttagatgtatagatgcaaaattgacattattctctatttttagggggaagtcattagagtttagactcagaatataaataggtctttgccaaatagtcaggtggggaaggtagcttcttatagacggagtggcatatgcaaagccctgcagttgtgaaataacatgacctgtgtgaaaaactgctagtactagagtttcagtagtgagggatattggtatgtcagcataggatgtgagggggaggcatttttgtagctgaatctgaaaattttgttagaaactgtcaaaatgtttttagcagttgagtaacactaaacatacttgcattttggaaagatatttcttgcagttgatatggatgagttggagggagatgagatggagttagagagacctttttagagtctgctgcattagtccaagagaaatacagagatcttaataaagtaaagaaatacaaataaagttggaggagagggagagatgtttgaaggatatttagaacatttagaaaatgtaacttgggggtgagaaagaggaaagaatctagaatggcttggctttgagatttgtgaaattcttcagaccctaatttgtaaaatttccttgtgaaactttaaaaaaaagtatggttcacaaaaataatgattgtttctttcactctatagcaaattaataacagcaaagtggggagggggactgtcaagaggtgggcaaataacctttatgtgcattaaatcttctcttcctcagtctctctcaaatcattaacattctttccctcagcaatgccattgccctagcctagggagcaatcacctttcactcagattactgtaattttacttttctcgaatccaatattcatgctgaagccagaataattcttcaaatccgatcattttattctctggcttaaaactcttcagtggtttttctcttttccttaggattaacgtcaacctttgaaaataccttacaaggtttcattttccttacttgtaaaataataataataataatacttcctttttgagttattgtgaagattaagttagttcatgttctgaagtgtttaagaacaatgcctggcacacaacactgtaataaatgtttgctcatgttatttttattttttgtttagtatcttactttccatcccatctagaccgtaagaaccatacaatttgaaatgatatttttcttttgattgatattctcagtatttagcacagaatatattaatattaaatattaaatgtataacacataattttatgaacgaatgtcacttggaagcataataatgaagcattcaaaagctctcaagcagaggcagaatgtgctatttgtcataatgtaataggagaatgaatttttatagtattctgtgttgctaagaaaaacaattgcatccagttgcttttgttataagacagcagctctgaaatgtttttattgtttgaagaaagatattagataaattgggaatcacataaaagtaattgaatgtatacaaatagaaaagaaaaacaatggcaatgtttggttattaactaaaattaatagataccgtaagtgatttctttatgtaagaaaaagttgctctgttaggaggtctgaatgtactttttctcctgaaatggttaagaaacaggtttattcatatatttattcatctaacaaaaattttaaaagatgccttctatgttccaagttctattttgggtgattgtgatacattagcggaaaaacaacaaaaatcactgcttatggagtaacatgttagtggataagaaagacagtgtttaataaacataaaaataagttaattataaagtagaaagtgaataagtgatgaaaactatagcaaggtaaaggatacattgtgagtattggagtagaggaggggtgggttataatttttagtgaagtgatcaggatttcatttaaaagatgactttaaagccaaaagttgaagatggcaagaagaggagattttaggcataagaaacagccaaggaaaatgcactggattaggaatctattaaaccagtgttgctgaagcagaatgaatgagggggaagtataatgggaggtgaagttatttaatgatagaggtagggcaagggggtggggagggcttaatgattttgaaacttctgtttaggaaatattattctattttagttgtgtttaattttatattttaaaaaatgtatagacctaatcaaattatgtttaaacaatatggcacagtaaggaactataggaaataaaggattttacattctgcaagatatttgataacaagtatattccttgcatacaaaactttatcagcaaaagtagcactcttaattcctttatagttgaggcatatatgcctggccatatgctttgcttccaaaaaaagtttttttgtctaagagatatttgtggcaatctgtatttttccctccagtggacccctcatttgttctctgtgccattatatacatgatgctgagattctgcttagaagtaagacacaagtccacatttgttccactacaattgtgagacattgctgtggctcaaactacggttcgtttttgagcaagactaaattttttggaccatttgggatattttttattatacatcttttgtagacttatagcaaatttaatgtttgaatgatttttatttttatttttattttttatgttagaattgttttttttttaaatttattattattatactttaagttttagggtacatgtgcacaatgtgcaggttagttacatatgtatacatgtgccatgctggtgcgctgcacccactaactcgtcatctagcattaggtatatctcccaatgctatccctcccccctccccccaccccacaacagtccccagagtgtgatgtttcccttcctgtgtccatgtgttctcattgttcagttcccacctatgagtgagaatatgcagtgtttggtttttgtttgaatgatttttaaagctattttctgagacaacgttaaatctccattctatttatagaaaattccacagctaattttaaaaaaagaaacaagtgatgataaatgaaaccggctttattgtaagcggaattcaaagtgttactaacaaagcaggtcccccccaaaatgggtttctctgttgagtgccataaagccagtacacaaaactgaaggtgaacaacaagcaatgaaggttttattcgatgcaatagaattgaaaagcaggaggttggctcacaaatcaacttctcagctcatgagagccgaaagtcacagatatagggcgtctttaatgaagaggttgggcattaaaagtaaggagaagaatattcatgtctgttctgaaatgggcagagaacttctcaaaaccggagcgctacctttttgtccttttagggtttcttccaatacttgtcatagtgatataggagttaaaaagaaattatttaggcagatagagggagggtagggaagtcctcagtaaggttttccttttaatgaaaagcagcccccaaatcattttcttttctaacaaagggcagcctgtaaaattgagctgcagacatagacaagcaagctggaagcttgcacaggtgaatgctggcagctgtgccaataggaaaaggctacctgggggctatgcatgttcaacatggtggctccatcttccctgtcccttccaaaccatgtgtgtgtaaggagcagacaacatggtgctggccaagtagaaaatccatttgtataataaaaagattagggtggagtggccatcttccttgcactatgtaaatgtcacacctggtccaaccaatctttgggccctatgtaaatcagacaccacctcctctagcagtctataaaagcccatgtacttcagcatgggccagaagtctcacaggagaaaaagagctattcccctttttctttcttttgcctattaaacctttgcttctaaacccacttcttgtgtgtccacatccttgattcccttggcgtgaaacaacgaaccttgggtatttactccggacaacgacgccacttcagtagtgattgtcagctgtcctggcactggtgggagtgtcatttagcatggaaattagattataatgaagtctgaagttcttcagaggccaagtgagctgccatgttgaatctcatcagtcttagcaggtttggtcataatagggaacttctgacctcaggcatcctgtttcctaaagataagcagagttaaggtgagataggaattcagctaggtagatcttgtaggcgttatgctgggtaacaaaaagatccccctgtgtaatatattcttggtaatataggggcactctgttaatttaacactgaaatttaacttttaaatttctttgcctttcagggcatcacagtttatttgatgtttgtatggctgtcaacatctctaagaatacaggaaaaatgagtcttagacatgttgccatctaccttacattattatctagagaaaggtatttgaactacatttcaccttcgatttccacatcagctgtttgtagctttggttgttgttttctgtgtgctaaacatattgtattttttttccatttacttatttgcaactcatttttctgcacaaaagttttggatgtcttttgtgattttcagcatcaaactagaaaactataaattaaaaaaaatcagaattagtgactatacacatataatggaatattgaggccaagaaaaaaataagtctgtagttattgtcaaaacatttgttgaaactgaactgcagcttttattttcagattgccaatttagaaagagcaacataataatttgtaaggaaaagctgactccttgcatagtggaagttgtatagacatttcataggatttgcagtaatgatcccttaaaatttgggtgaagtgcttgtgcttaaaagcagtagaattgttaagatgtagtgagagaatataaaactttcctctgtccataatgatgttctgttgttcattttatgagagaggcatcacattttccaaatggcaatgactaaaaagaattattattttttatgaatgtgttagatatgatataaacagatgcgatttttttttctttttaactcctttattgtttataaactgaacataatctttctttttaggacactcagctataggatagtttattgaatatagatgcttaaaataagaaaaacagtttaagtcagtagcttaaaggtaggaagcaaatgataagcttcagacaatggaaaagaaatgagaaccaatggtgtttggaaaaaaattgtaaaccatttactttccactaacctcataaaatgtgtctttcaaaaaataaaaatgcatttttcatacctggactctacatatggttttgaatggaaaataaagaagtcttcctgaaataataactgaagaaagcaagttaaaatgtgaatcacttgcctgttatgcaaataatgattcagttcaatgttggatttcaagggccaataatttttatgaaagtattactaaagcaaggtgtttgggttggattttaaagtctatgtcctttggttgactttccgtcgttttattcattttagagagcttgtttataatattgtggcatgtatttcattcccaccaaattcttccttttgcatccttggcaccaatgtggacatacaggatctaaaacctaaagatatatttcataggtgaaactgtttttccatgtcataaactctcttgtgcatatacctaaatatattatatttaattttatatgataaggtctacatatacttgagacacctttttatttaaataggaatttgaatcagtaattactgactaaatgacagacatagtgtatatagatcttataaattgtcagatattaaggacattattaaggattattattttttttattatactttaagttctagggtacatgtgcacaacgcgcaggtttgttacataggtatacacgtgccatgttggtttgctgcacccattaactcgtcatttacattaggtatttctcctaatgctatccctcccccaggccccaccctgtgacaggccccagtatgtgatgttccccgccctgtgtccaggtgttctcattgttcagttcccacctatgagtgagaacatgtggtgtttgattttctgtccttgtgatagtttgcagagaatgatggtttccagcttcatccatgtccctgcaaaggacatggactcatccttttttatggctgcatagtattccatggtgtatatgtgccacattttcttaatccagtgtgtctttgatggacattagggttggttccaagtctttgctgttgtgaatagtgctgcagtaaacatacgtgtgcctgtgtctttatagtagcatgatttataatccattgggtctatacccagtaatgggatagctgggtcaaatgctatttctagttctagatccttaaggaatcgccacactgtcttccacaatggttgaattagtttacactcccaccagcagtgtaaaagtgttcccatttctccatatcctctccagcacctgttgtttcctgactttttaatgatcaccattctaactggtgtgagatggtatctcactgtggttttgatttgcctttctctgatgaccagtaatgatgggcattttttcatgtgtctgttggctgcataaatgtcttcttctgagaagtgtctgttcatatctgtcgcccactttttgatggggttgtttttttttttgtaaatttgtttgagttctttgtagattctgcatattagctgtttgtcagatgggtagattgcaaaaattttcttccattctgtaggttgcctgttcactctgatggtagtttcttttgccgtgcagaagctctttagtttaattagatcccatttgtctattttggtttttgttgccattgcttttggtgttttagtcatgaagtccgattaaggacattattaaggattattaagcaacattgaggtggctgctaaaatattttcatagagtgccttgatgggcacactataggggttgcagctagactgataaatactacactttagattattgctgttgtagagcttataacaatccagtgggttataggtatttaactgtgattacttctcatacttcaaagttttgccctttaaaaaacaaaccaaaaacccctcagatattggagaaagcctattgagaagagattgtcatcacaagtaaggataataaaactgattttttgcctgctcttttggatttgtttcatttcagcaaagaaaggttatgcttccagattagaatttattttttgtgttttcaataagatatctaagacaaaggcatctgttaaaactgtgatctagtggcttctaaatgtattaaaaagattaggaaatattctgaggcaaagactcattgatttccttttatatttatttcaccttggtgataataaaaacggatggaactacaggctaaatactactttctagccccacagtatgtttaaatacaatcttaacgccatgcttgtggtttttgagttgtcagtaatctcctggatgaatattgtagactgggtatttgcagccagcacagctgtcttcctgacagaggttcatgtgaggaaaaaacgtcaggctgggctaaaattacaggacaaaatagaagcaaaagtattgtattctatgaaaatggtgatgatggggtagttttgccttaagcccttttgaaaaatcatttttaaaacattatggaaatgccacagttcttgaaatatttttttccccttgttttgaagcctaagatattatgggacaatagtcataacaaattagactatgtttcaaaaaattactttgtatggcacagttctttacccagagctaggagatagttcactgtttttgtgcagttatattagccctgatatgcctatttagtaagcatatagtaagcatgctttagtaagcatgcctttaaaatcactgttagaaactctggtctttgaagtgtgcctctttgggacacatttcttagggcttggaaaccaaacagattcttaccagctgagctcctagttttttctaggaatagattatgaaatacgtaaaaatatataagaaatggttcctactcttaagaatcaaacactggagatatcatatgtgtaaaacaatgtgagatgtgatacatttttaagggtggagtttagtaattttgtagatgggggctacaatcttcaatccttctttaaaagaattgtttatttccttcatagtcagaaaatacttaatgtgattaaatgtttcattaaggtttttacaaattaatatgtaaatttatttttatccttcattcagaaaggattctaagtgtctatacttactagtaaattacatgtttcataattaaactgtaggaatgctattcataacatactgacataggaacaggtaaatcagatctgggacttattgcttcagtaaggacaaaaaaatcagtaaataaaaggtccagatagtaccacgatgatacattaacttgtgttaaggtacatttaacatctcttaagcgatttaagagtgactttcatgcctagtttttgcagttttcattttaaggaagatattgaaaatcctggaggagattcagaaaagagcatcctaagtaactgaaggggaagcatgacctaaaaatatgatagcttttaaagattatttttaaaaagatgattagaaaacactacttttatatacctgtatattacctttcataggaataaattaacaaatgagaaaaaatatttgatcaaactacttatcttgacttttgattcagaaaatatgctctatattttgtggaagttaataaagatttgggagtattagtggtcttaaaatggaccaaactagtttaatgctctgctcatcccctctgacttttctaggacgtagctcctcagttgttttcctcactcatcagtatacaaccttgttttatgtgtgtttctgtggaaatccccttattagatattcctgatttattaacattgacctcatggccaacagcgctgtaactcatgcctgagggaagcttatctaacacaagtgttttttttttcgtaaggcatgtcatagcctttgcacttatgaacattaggcagcaccttactactatgcttggggaccattttaaacagtgaaatcacagcagtaagcaaaaactgtgaaaaacatggtgttaaaaagaccaagaaaatgatacttgtttatagtatgacagttgaaacaagaatcatacaatgctctacctggtatgaccttagctgagaatgtgtatgttgggcaactgaaaatttttcccactttggggtcaggcatggtggctcacacctgtaattgcagcactttgggaggctgaggcatcctgatcacaaggtcaggagatcgagactatcatggctaacatggtgaaaccctgtctctactaaaaatacaaaaaattagccaggagtggtggcaagtgcctgtagtcccagctgctcgggaggctgaggcaggagaatggcgtgaacccaggaggtggagcttgcagttagccgagattgcgccattgcactccagcctgggtgacagagcaagactccatctcagaaaaaaaaaaaaaaaaaaattaaataaacaataaattttttttcccactttgtgcatgtccacaaatgaccacaaaagcacctaggatatttatttttgggttacaaataagtttagccagtaggcaaactcttaaatatggaatcttcgaataatatagattgactccatctgggaacagatggctctgttcatgtctcatcttttgcttttcacttttatctctatcttggtatctttctagagatactcctcagggaatctcggctttcattattttatttcctgtacttgaaaatctattcttgattacctttattgcagctttaaatttagaaatcattaggattatttttcagtggcgtttccatacgtcagattatatagactttatgacagtctagtttctcacacgtgtaatttgtccttttaagttctaatgcgaatgtgagttacaagttttccaaaatgtttttctatttttttgtagctacatctctgttgaagatctttttgttaatcactgagttattaccttttaaaaaatattgatgatgatttattttggtttgtttttgtacttacatgacagacttctgtgcttatcttttatttggaattgaaacgacttctggcagaatttatgtgtgtgtgtgtgtgtgtgtatgtgtatgtgtatgtgtatgtgtgtcttttagccttaaagtatcaagtgcagggaggggtttatgagttttatttgttagaagtctaacagcttgaggaatgtgaggcgctatatgtggcagggatgttttcttgtttgggagacttgcttccaaacaagtgcttgcagatatggatatctggtgtgggagttaggagtttgtatagttctattctttatctagcttctggcctcgggcaatttgaaggaatggtttttgaagaggaaaacgggttttatttaaaactaaaatatttaagcacctaatatgagctctttatattcttggcattatattaataggtaaaaacctcttttctctaaagagttcaggtggcctaaaatcatctatttttatttcttctctatccttgcctatggcatcctttgtctttggtctagtctggggaggggttagaaaccagataactagccttgttggaattgctcaaagaagggcaggtggcttgcttctgtattagggtttgggaacattctccttgcacataaattctggagcacaaattttggatacttttatttactccttaggatacatttttttatactttagaaaatggttttttggatttctgggttgcctaataaagtaaggaaatccaatggggcagtatcatatacatttaccttacaggaagtgtaactcagtgtaatggcaaaagccaaaagcacttgggcaccaaaccaaccaaacataacagtaacaatcctcatatccaaatagacaaaattagcatatgccctagagtgtgaaatgataggtatatagcctgttcgtttcatcagtcagtcttctaaaatgtctccttaatagggtttagagaagataccaaatattaggtactgtttagttcagtgtttatgtgtgtgtataaatatatacaaatttaaatatataaaaatatataaaatatttaatatataaatatttaaaaagttaaacattaaaatatataaaatgtaaaaaatataaaatataaatatacatttatattttatacatatatttatattatatatatttataacatatattaaatataatgtttataatataaatattatatttataaatatatattcatataaatatgtagataaatacatagtatacttatataatatataatacatataatatataatatataatacatattatatataatataatatataatacatattatgtataatataatatattataaatatttatatatttaaatatatattcacatataaaatatatatttatatataaatattatgtatatataaatatataaaaatatatatatatatatttgagaccaggtcttgctctgctggagcgcaatggtgtgatcacagcttactgcagcctcgacctcccaggcccaagcgatcctcctacctcagtctcttgagtgggtggggctacaggtgcatgccaccgtgcccgtctgattcttttattttttgtagagactgagcttccctttgtagcctggcttatctcaaactcttgtcctcaagcagtcctctggctttggcctctcaaagtactggattacaggcaggagccaccacacctgtcctcaggattttaattttaaaagtattttatttaaatacttcaaccatttttagtagaattctcccataaggcaaacattcttatctcccctttttttctcattatttttgtctttttagagattatattaactctgtgttaccatatgtttggtggaaggacagctttatgagtgccagttcttaaactgacatgtagacagtgttgcatcatggcctatagaaaagtttggactgttttttttttttaaaaaaaaaccacacaattttttatctatagcagagatatttgccatagattttatttcctcggaaatgattattggtttattatcagagagtaaatttgaactactttttttttttacccttaatccccttcccaaagaaacacaaatggctcattcaatctaatttcttagtaataaatagaaaaaataaacaggcaactcctagtcaccagggccctaattcagaagaacaggatactcccagagtagaactggttggaatattttatgcttgtctagcctggttagttgtgagcagaaagtaattactaattgatggcaaggaaggaagagaatctgattcataggtactctaatcagaataataataattggaaaattgggacgtatccgtattattttaagtgtgatttttaaagtgctccttaagtcctaatagaacaaaaaagatttatgctgtgtattatacatattagaaattttagcaatggttccagtgttgtgatttttgtagttatggttacattatctcttaaagaaaactttcatagacttaataattcaacttcaacattttattttaggctaacattttggcaggggtaggcttgttggtgactattttctgaagcttgaaaagtcttgcttaaatcatagtaaattgttatttctagtatgcatggcatttttcattcctagaaatgaagagtcatttttggagatgtttataaaacatgaaagtagacaggagaataggaaggtctgacattgttcatgcttttgcagctacaggtaattcattttcagatcacctatctgcccctaatgtaatattcccattcctgaaagtagagaggaaaaaaagtagtccttgctagaatgtcctgtgaaaaaatattttttaaactaaaatttgataactattcaaactttatatatttatatggattattacatgtaattttcactttaaaaagttaactgaagacaatatttttcatcttttagtatattcaaattccttctataataaaattgtcaatagctctgtgtttcatcctgatgatatgcaaaatgcttttcctgcatcattgttggttcaagttactaagcgttagtaaagcctcagtatcaagtagcttttccatccaggtcaattgcccccagttagaaatcattaatttcattatatttatctcaatttattgcatacttttgaaggtaatcactgttcctaggagataagttatctttcatgccaagaatcagttgtaatattttccataatacttccaccaaataacaacatgtatttgatgtttttcgttaatgaataatttgaatgtgattgaattcatactgctcctatagcattatctatctaacataacaaacctgccccattttaaaaataaattctttattaacataactttataatatctcatcttagcaatgaaacatgcttttcaaaatcatcttgttttttatctagatcattgttttctttattattttaaaatcatgttatttctgaatatctttatgcaggaaagtctgtcttgattcatgaccttgtttttttttttctttaaagttacggttatttgaagaggaattatcataggatggaaatacatactttaaattggttttatgaaagtttgaaccaagttacattgtcagtgcttatctcatactcatctattgatccacttaatacatggaaaaagagttttagtacttgaaagttagaaaaaaatactacctttcaatttgaatttttgaaaattactcattgccttggactaaaatatttttatcaggtagtttttgttttgtttttcttaactctctattcccattttttgaacatttttccttttgggattgcaatatttcttataaatttctatagttttttttatgctatgagtattgatttaaactccattatctaagttctgttttttggtgaatatttttcctaataatttaatgcatcattaataaataatgagcaccagctcaccagatattgtcaggggtgaaagttctgaacccaagagacagaagtcttgaatttacagtctatattttagtggtgtatagacatagagcaaatagatgaatttgtagtttctcaggtggtgatggtgctttgaagaaaaatgaggaataataagcaagctggaaaatggtaggatatggtcttttatatagggtggtaatggaaggcccctctggcaagattatatttgagtagagagtattagcaagtacaggtattggcccttatggatctttttttttttttcttatgtacttatcacagactttcccctaaactcacccccatagtgttttttttttttattattatactttaagttctagggtacatgtgcacaatgtgcaggtttgttacatatgtatacatgtgccatgtaggtgtgcttcacccgtgaatcttgagtgtgtgtgtgggtagagaaaacagtgtgaatgccctgagataagattgtgcttgatgtgctttcagaaagtacaaagatgtttgggtgctggaaggggtaatcatgcaaataatagagagataccagggggccaccctacataaggccctgtaggccaaggtaaggattttggattttactcttattgacgtagaaagctattttaaacaagagtgccatgattgtcatgaattaaaaaaaaaaatcactctgacctctgtggggaaaatacactgtatagggtggggagagaccagtaggatgccattgccatgttctggggaagagaaaatggatgctttggactagggcagtggcaaatggaggtggtaaaaagtggttgtattctggtatatttctttttttctttttctttctttcttttttttgagacggactctcgctctgtcgcccaagctggagtgcaatggcgcaatcttggctcactgcaacctccgcctcttaggttcaagcaattctcctgcctcagcctcccaagtagctggaattacaggcatgcactaccatgcctagctaatttttatatttttagtagagacagggtttcaccatgttggccaggctggtctggaacccccgacctcaggtgatccacctgcctcggcttcccaaagtgctgggattacaggcatgagccaccatgcccaactggattctggtatatatttcaaaggcagagctgacagggatttctgtcagactaacgtgaagcatgaaggaaagggagtagtttagatctttggtctgaagagcctgaaaaattttccatttactgacataggaaatctgagggaagaaaatgtttggagaggtgagggaatcagtttagtttggggaaggttaaatttaagaagacttttagttatccagttagatagttgaataggcagctagtacatgaacctggcattaggggtttggggctggcatacttaaacatgtggctagatgtgatcaccttcagagtaaatgtaaatagtatcatccctccttatctgtatctgcagatttgatcgactgtggatcaaaaatatttgggaaaaaaaaaacaataaaaataatatagataaaaaatacaatataacaagtatttacattttgttaggtataataaatagagatgatatataaagtatgcagaaggatatgaagagattatgtgtaaataccatgccattttatataagagacttgagcatctgcaggttttggtatttgcctgggatctggaaccaatcctgcatggatactgacagacaactctggagaaatttgagccctgagaagcagtgcccaaccacggacttgagctagaatgcccaggtttgaatctcacttcaaccagcagtggggcatgttgtttactcttaatgaacctcagtgtccttgtctgtaaaacaaggataaacacagtacttatctgtaatagttattgtgaggatcaaatcactgtattaatatgaatatacacacatatatatgtatatatacacacactacttatagctatattttgtatatagtaccagtggttgctaaatattttgacattaagacccctttacactctcagtcattattgtggatcacaaagagcttatgtttattgatatttaccatattagaatataaaactgagaaatttaaaaaatgtttaactcatttaagaaactattgtaaacccttacatattggataatattttgggaaacatagctatattttccaaaataaaaacaaatttagtgagaagaatgacattgttttatcattttgcaaatctttttactctctgtcttcatggaagacagctgtattctcttatctccttgtttattcagtctttggtgatatcataggtcatgcaacctctggaaaaccccagtgtatattcatgagagaatgagagtgaaaaagagaatatctcagtagttttatgaaaatagcttatgaactctctaaaagggttgcaggaatactcagttcattacatttcttttgctgtggtaatggccttcattccttggctcatggtcctcttccatcttcaaagccagaaatggctgtttgagtctttcttatattgcatcactgaaaagggaaaggtttccctatcccccttgcagggtgtgtaatgggggtgtggcttgcttctttggtggcccgctacttatacctgtaagggagcatacagatgggcaggttgtggggctccaaccccatggcagtgtctaggggtgaatgtttacagctcctgaggctgcagtgggtgtgtgttatcatgtgctcttttagtttagccatctgcgggctgcttgtgttagtcagcttaattagaccccctgcctatggcaaggacagagggctttctgtatcccgaggttcttgcctttgtgtactggaagaattggatcccatgtgggcttggagaatgagtgcaaggttttattgagtgaaggtagttttcagcagatggggtagccagaagggagatggagtgggaaggttgttttcccctggagttgggttgctcagtgatgcgggctttcttctgtccaccccaatcaaaccctgtgtcattctgccagtcgatggtctgctgccttgctgacgtctgtcggtgtgcttttccactggcgtcctctcaacgtccagccactacatcttcttctgctgatgtgctccccttgaaatccagctgcttgtgtgtctgcctgctagggtctcagggattttataagcataggatgggggcatggcaggccagggtggtcttgggagatgcaacatttgggtgtgaaggcaggagtgcctgtcctcacctaggcccatgggcacaggtctgggggtggagccctagccaaggaccatgcccttcccatcccagcactttccggcccccctcccatatcatcactttgatactaactcttctggctccctgttccacatttaaggacttttgtgatgacattaaactcaccagaataatccaggataatctccctattttaaaaccatctgattagtaacattgatttcattaactaccttagttcctttgtcttgtaacctgatgtctccataggttccagaaattaggatgtacttgtttttaggatgccattattctgcctattacacttaggattccttgaccacactttgaaaactatagttctgtgtagatgtttcctgctattatttcatcatcctcattatttctgaaatttgaggtacttccacatgttgagagatgtggaggaactagtaaaaggaggctgagaatgcgtggctagtgggtttgccatccaggccaagaaaagtctgtttaaaggcaacagtagttaactgtggcaaatgctgctgaaggttatctaaaatcaggactaagaaaagactgttgtgtagatgtattaggcaaaatattgccctcttaagatgtccacctcctaaattccagaatctgtgaatatgttgcatgtcaagagattctttaaaataggtgtaattacgatctcagacctcaaagtagagagattctcttggattcccctgatagccccagacaaattacataattccttaaaaatatcgaaccttttctggctgtggtgagagacacaaagaagcatgagaagaatttgatgccctgttgtttctgagatgcagaaactgtgtgcaaagaactgaattttgtcaacagttcaaattaagaaacaaaagaagcccttccctagagcctccagatagaaaggcagtcctccctaccagcatcttcattttaacccagtgagacatgttgacttctgacttatagaactgtaagataataaatgtgtgttgttttaagccaccgagtttatagtaatttgttatgacagcaatggaaaactaatatagtaggccatttgttatgtcagtggccagttgtggcatagtggtggggatgaaagtctgttggagtggatttaagagaatgagaggaaaggaagtggaatcaggatgagtatagaaaattcttcagtgtatgaggggcaagagaagatttatttatttttttgctgaaaaatattatagcaagcttctgtcatgggattgatgcagttgagtgggaaaattgatgaccaagtgaaagagaggccttgaaggttgaagatggggagagcaatacccctgagtagatgagggaatataggatctagtggataagtatggggtgttatctttagatggaacaaagttcttgcagtaatagtagggaagactacatatgtgggttcaggtacatacagactagtggatgtaataggcatatgtggaaaggcatttctgttagcttccattttataagaatggagtaaagagagttgaggagatattggaggtttgagtgtgaagaaaatgtgaaataggctgaagtttgtagacagacagaatcactaatactgcatatcatgcctttttatttgacatagccagataaccttagatattcctcttaggagtctggcctatcaaacttaaggcattgaagagtagaaaatgcatgttttgtgtagtcagggatatgtttggtggggatggggaggtggagagagagattgagagacattgagcaaagaaagtaataaaagaaatatgttgagagagactgaaatagagtgagagcaggagatatacacatacattgacatatattgtgtaatatatatatatatatatattcaaatacatatacaacccctcttaatgtccctatcaatttatcacatataataaacagcataatgtaatatatacacatatgttcatatgtgcaagcacacatattcattcgcatagccatatatcatatgtatatatggaggtgggaatgggagagtagaaggaggagcttgagggagagagtttgagaggaatgatactgagccatacattctcaacttttccttaccaactcaaggattcaggtcacctcaccttttatgtgtagagagggagagagaaagggtggggtaagaggtcaagagagttgttgagtttcctattacacagaaaaatgagcttagggaaaaggtgtctccaacagttcaatttctttacctgtactttcattatttataaaatatggaggggagaggaatgttcctttttcatctttatggtcttttctggttctataattatacaactaaatttatgtaactggtttgatagcaaattttatacagcaaattcttatggaatatttgtttctcattttataaaacgacttctctagaaataatgtatcatctgaccttttggtacactggtaattttgtagtcctatctaggctgatgcctctgttttttgacagacactatgcattattctaacattaattttaggaaaattgacattacttttctaagagtgaggtaatgtttttgctggcttgccagctacttttgccaggataggagagagagaaaaatagcatctgaaagatgtgattcatattttataagtcacaaataattttttctggtattttaaattcatatctaaaatagttattttattttggaaccaatagatattttaacaaaaggaaaaaaaatagtgcagtgtgaaatttttggagcatacttgtaataagaaatcaaagttatactaaagaggtaacatttatataagaatccaatgtagtcactagcaaacttaaaaaaatcttacttggagttaataaaaccacatactaatcattgcttgactagttttataaggaaatagtgaaatttggtgatctttttgccaacagataatatttgcctatttttccttctgtttacttttcatcatcattaaactccaatgaatatgtattagaaaaaacattatctctgtggtaaaatatagagtagaagaagtttccctgtagcaatgggccttctttccatttctatgaatattttactctcatttgaaaaagatttatttcatatgtgtcatatgcttatccatattcaccatcaaattttatcggcatatatagtcttcactctgagacagaaggttatgataaaatctctttattatcctcccagttgtcatcaaaaataaaaggaagactctgaggaaaactaatgtttcctgactggttactatgtgcaaggcactatgctatctactttgaatgcattttcacaataaccctgtgagattgttgttatctgttttacagatgaggaaaatcaagtttagctattagcctttgaatgagggttttcttttagacccatgagccttccactattttctccctcagtaaatattttctaaacattggttgtttatatccattgcttaatgtcagccagatgccagtagacagagaaggcatctgcctacactgagttgaggggaagctggtattattatttcctctcaatatgtcagcctttgttcctcagctttggtgtcagccacctcatcattagaaatttatttcattgagttaggtttctaagatagacacttagtattttattattttaaggttaataatatattttttgaaatggcaacatcttcatgcagttcagaattttaaaaagtacaaaaggctatacagtataaggcccccttcccatggtatctgctgcccacttttcctttcttgtgtcagccaatgttagcaatttcttatatatccttccaaatatattttaggtatatatatacaaatttactgtgtatatgtgtatgcgtgtgtttgtgtgtatgtatacatacatatatattcatgttttaatataaaatttatcatactttttcacttaacataacttagattatgtcagtatagtaagagctgcttcttaataatctatttaatgggtgtactatcatttatttaacaagttccctatattgaacatttaagtgttttctgaccttttactacagttaccttatgtatttagatactgttattaaatatggaaactgagacttttatagctatttattcacttactatctacacttactgcagtgtaagctctaagcacaggtaatgtctcaattaaaacaaaaaactcttaccaaattacaaataaacatagtttaaagagccatttctaaagctttttttaatgaaaaacactattcacaggtcctttctccttcctgccatttttctggtgccccaacagcaattactttcaacttttaaaattaatatttatgaccatgtttttaaataacatactttacaatatttctgcttcttgatttttcggatcttatgtatttttacctctgacccaaacctaggagttcctttattcctccaatatagttatatcataaatttgactagatcagtattcagtctttacagtataatggttatgtcagtgccattgatccctgaattatatcacatattatgattaattttttcttcctgaacaactttttatctttaaatgaatattgtcttttatgcatttttattcattgtgatttttttccatgcaatttttttttggctaatttttattgtgatcttatatatatttgatcttaattaaccgagttcttgggacttaattgacacttctgtctctcacaggtgaatttgtggttagttctgttgagagctgtgaatctcaagtgtcctggcgctatgctggttatacatcccagggtctttagtgtagttgtctataactagttattgtaatttgttgccaccccagtgcgtgtttttctgattgaaaaccatataaaaacctttgttcttgagacagccttgacttttagaagtgttttctctataaaaatcaagttacagttcggttttgggttttggactcttggaaatttcccttcttgtaagccaagtactactctaagcattaagctatgttatgatttagttgtgtttttactggagacacttttaagtataaaatagtgctggagatgagtttctgggcctatatttgtctattgtctagaaactctaaccgtcccttcagtgtgtagtatttagttatgggaaatttattgaattcgttttttgcttttttatttttttatatttaccagtttattaagaagaatattttagagaatacaaataaaatagctagatggagagatacatagggcaaggtatgggaaaagggcatggagcttccatgtgctccctgggattgccaccctccaggaaccttcatgtgtccagttatctggaagctctccaaaccctgtcctcttggttatttatagtggctttatgaggtaggcatgatgattaaactgttggccattggtgatcaacttgaccttcaacctctatcctttcccttgatgttgggggacgggactgaatgtcccgaacctctaatcctgccttggtctttctggtgaccagccctaccctgaacctatcaggcaaaagacacataaaagacaacactttggagaccccaaggattttaggagttatgagctaggaactggcagtgaaaatcagtatatatgtatatatcataatactggaggccatcctctggtttttgaccatggatttctcacatcaaaagaatatacataattattaataatttgttcagtccatcatattgtttgggggtctcccagggtgaggccattcacgtttgcagatttcctatcaatcttctcagattccagaagcagaagtggtcctgacaaatgcacagctttatttaccctttcagggatctggaacaattgagctaagagacagtatcatctcttgctctgagactctttagagttgttaatgtaatatggaatttccttcagttaataacccacttattcatttctttactctcagctgttacttcttcttctgtccattagtaccctatctttttcacctttggaagggacattagaattgctgctgtgttggtctggattgcagggagcaggttaagtttaccaagtacctcttcctcagtccattcccattcagattaggtacagttacttaggtacaatactagtgagctatttttaccaccagacaatatagctacattcacttttaaccccaattttgctagatgggggtgaagatgtaacccacccccatcaggccctttagaaattatgaaatgaggtttaaaaacatactgacaattccttgcttagaaatcacccatgcttccagcatttgtagttgcagctctggtcctaggaccactatatcaggtaggggaaaaaaagatatttttaaaaagtgatttgaggaagaaatataaaaatgcagttgttatatcagtgtatttctcccttggcaagaattgtatagtgtgcatcaccccctctcccccagatcagccagaaaaacagaaatctagtggggacactcctttagtcccacttatgttaagtgtgagcacacacttgtgaaggcatgtaagccaaccattcatgcctttatttccctgttttagacaaccaaggtttcaactgcccatctacttctctatcagactattacattactctaaggaggccatctctctgtccattgttggacattatgggctgcacagtgtgttccttggtgtgaagaaatgatggtcaactatccaaattcatacagtatcttctactctggtggaatactgtcaattcctgtcaagacccatgtgtagccctccagggctaccagcatcggtctcatttgccagctatgtttagggccaccagggaatttgctccatagccatctgcagcctctgtctcccttattgacaaatagaacagttcctactggcattatgtatctgagagtgtgcaaaaggaacatgcctagattcagcccacgtctgcactgctgcagtgcccgcgtacccactcatgtcgtagacccaggtggccaccccaaggcagcacacagggatatctgcttgttgatttcagtcaccttccaaacatggaaaggagttctgatgagcattgacttgttctgttttaatgcatccctcaaaatgttgatagcaccatgatctacatgaaccttgaattatttttgatgtgttactgttttgttttctctcttctttctgtaacaactattgtttggttgctcgatctactgaattgcctgttttattgatttttctttcctttattttctctctctaatctgtctgattttcttaactttgtttttcttttcttttttctttttagtcagggtctcgctctgtcacccaagctggagtgcagtggtgtgatcttggctcactgcaacctctgcctcccaggctcaagcgattctcccacttcagcctcctgagtagctgggactacaggtgtgcgccaccgtgtctgactaatttttctactttttgtagagacggtgttttgctctatttcctaggctggtctcaaactcctgacctcaagcaatccacccaccttggcctcccaaagtgatgggattacaggtgtgagccaccatgactggcaatcttatttttcaattgatatttttatatgaattactatgttttgtatttccaagagctttattttttgttgttctttgagtcttctatttttatagcatttggttcttgttttatgagtgtcatatcttctcttatttctttgaggatgttaatattattttttattcctatataatgtttcttctaactgtgctttttccttttctgttattgtctgatgatatttgtctttcatttagaagctttctctaaatgttttgttttccagaggtatcttttatttaggaatagggcgcaaaaggttgtttggaagctctatgctgacaaatggggcatgatgtagagcagacttgactgtatagttataatgacgaggctgtttattgtcagccctctcccactgtcagtgtctttgagcagggctagttttatgagtgtacaacctctgtatttgcacagggccctatgcttataagggcctcatgcttggtttaatctactattgacatctttaatttcttagtttttgagtaaggtttccacatttttattttatactgagtctcaaaaattatttagctggtctttcttgcttggtttgataaccttctctagagaaggtccatttagtctcctgtctggtgaggataattcaggctaaacaggaaagatttcagggcctttatatttactgtggaaactttcactccttttcttgtttactctggtactcctgccctcatctgtgcctaacgttcccagtttagagaccttctgtattccccgcttcagagaatagaccctcattcctctgttacaactgtatagggtcaagctctgcagaatggtagaagtgatctggggaggactacaaattaagcaaactttcaggcaatcatcctgctcttaggattccttttacctactcttccagagtactttgctgctaccaaatcctgagtattttgggttttctgcagtattattgaattatttctcacttttcacactgcttctttaagattgtctttttttcattttgctattaaagttagcacacatgcatctgcttttagtcttttgttttctcaactttgactctttgcctttatacctttgtactattacaagcaaaacaaaacaaaacaaaacagaaaacctatactctttttcagatattttagttgcattttaggtggcagcaacagtaggtacctatgaataatctgccatttcttttaaagatctggtattattgctattaatttttattattaagatctgtgttaaatagttgatattctgtttaggagaggtaatttagacaaataattatttttagatgattaatttagacaagtaattatttttaacacttaggtaagaagtaatttgaaaaaggccatgtcataatcaggagaaatatcttattgtattaatgtactggtgtcccgggcatacactggacaaagtagaagttgaggtacttgaggttttttggtgtgtgaaggaagaagctcattcaaaggacagtggaaaagtacagtgtttgacttctagggctgctataacaaattaccacaaacttggtggattgaaatacaggaaatctattctctcacagttctggggattagaagtttgaaattaatgtgtcagcagggccacactccctctgaactctttcctgggaaactctttcctgttctcctccagtttctcatggcacgtgacatttactggcttctggcagtatgactgactccaatttctgcttctatcttctcctggccctcttccctgtgtctcaaatatccctctcttttctcttataagggaatcagtcattgaatttagggcacattcataaatctttacctcatgggtccttaattataatgcaaagaccctatttccaaataagattgcattcataggtaccaaggattaggacttggacaaaactttttaggggcacaatgcaatctgttaccgtgttcttcctggccccacaaaattcctgtccctcactgtgcaaaatacattgactgagtcctaatgttcccagaaatctcaactcaataaaacatcagctttacattgaaaatctcatccaaataacattaactcaaaagtctcaatgtcatcatctgaatcatctaaaccagatgagggtgagactgagtgtgatcaaagttcttttattggtagacctgtgaaactagaaaacaagtcatctgctttcagaatacaatggtggtacaggcatcagattcccgtctgaaagagaaaattggagaaataaaggaatcaccagttccaaacaaatttaaaacacaggaaggaaaattcattaggtttcaaggcctaagactaatcctctatggcttgatgctttgccatctaagcccatgactacagtttggtgagtttctggacctgtgactctagtttgattattgtctgggcctgtgctccaggtcagttgccctctgtgcccatggccctggcttggttatgttttctacttgcagttctgttgccatctgtgcctgtggctctgctggcctctgcctctgcaccggtggctcaagctatgcctctgggccctgggctttgcaaccgtagatctaacctcaggtcattcctcctttttttttttttctgaagattagcacatatttatagcttcctagtctaatgagcctacttcctccctgtagaatctcagcagtctgacagtcattcttcatttcatttatttttcctgcatcctaggcttcatcctaggcttgctgtatatctccttcattctaggcttgctgtatttctcttagtacaccattttcaaaaaccttgtgaatcctctgagttaaggggattcatgctattagacaaacaagttctccacagatcttttctggataaccctatacaggcatgccttggagatactgcagagtttggttccagactgctgcagtaaagcaaatattgcagtaagtgagtaagatgaatttttttgtttcttagagtacataaaagttacatttatactataccgtagattattgtatgtaataccattcatgtctaaaaaatgtacctaaattaaaatgcttattgctaaaacatgctaaaaatcacctgagctttcattgagtcataatccttttgctggtgaaggattttgcctcaatgttgatagctgctgttgataagggtggtggttgctgaaggttggtgtggctgttgcagtttcttaaagtgaaactataatgaagtttgctgcatctattgactcttgctttcatgaaagagtcctctgtaacatgcagtgctgtgtgatagcattttacccaaaataaaacttctttcaaaattggagtaagttctctcaattcctgccactactttgttaattaagtttgtgtggtaatattccaaatccctggcggccatttcaacagtgttcacagcatcttcaccagaagtagattccatctcaagaaaccactttctttgtttgttcctaagaagcaactccttatctgttcgagtgttatgtaattgcagcgttcagtcacatcttttacttacaactctagttttcttgctatttctaccacatctgtggtggaaaggaatttattattattattatttttagcagtagttctcaacaatggtcttaaaatatttggtaaaccataccgtaaacagatgtgctgtcatccacgctttgttcttcctctgatagaacacaggcagagcagcataatgcttaagggccctggattttgtagatggtaagtgagcattggcttccacttaaagtcaccaactgcattagcccctaacaagagtgtcagcctgtcctttcaaactttgaagccagtcattgacttcttccctctggttgtgaaagtcctgcgtgtcatcttccaagagaagaatgttttgtctgcattgcagatctgttgtttagtgttgccaccttcatccactatattagctagaacttcttgataatttgccgcagttctacatcagtacttgctgcttcacctgacatttttatcttatggagatggcatttttccttcaacatcatgaaccaatctctgataacctcagatttgtcttccacagcttcctaacctttctcagccttcacagaattgaagagagttatggccttgttctgaattaggctttggcttagggggaaatgttgtggctgtttcagtcttctctccagaccactaaaactttctgcatatcagcaataaggctgtatcactttcttatcatttgtgtcttcactggagtagcacttttaatttcctccaaaaacttgtcctttgcattcattcccatcttggctgttgacctgagagcccttggttttggctgctctcagcttttcatatgccttcctcactaaggttaattatttctagcttttgatttaaagtgagagccatatgactttatctgtcatttgaacatttagctgttattatagggttattaattggcctgatttcaatattactgtgtctcagagaatagagaggctctaggagagaggggtagatggggaaatggctggtttttcagtcgaaacacatacaacatttattaagtttgccatctgatatgggcatggtttgtggcacctgaaaacaatagtaacatcaaagataactgatcacagatcactgtaatagatgaactaataatgaaaaattttgaaatattgttacaattaccaagatttgacacagagacacagagtgagcacacaactgttggaaaaatggtgctgattcatgggggaaacaacacacattggggccaattggaaggtggagggtgggaggagggagaggatcaggaaaaacaacgaatgggtagtaggcttaatacctgtatgatgaaatcatctatacagtaaacccccatgacccaagttttctacgtaacaaaccttcatgtgtacccctgaacttaaaagcattcaatttgtaaaaaatgcagtatctgtgaagcacaatataatgaagtacagtaaaatgaattacatgcacttagtggcttaaaacagcagaaaattatgttatggaggtcacagttttaaaaatcaacatcttggcagggtcatactgcctccaaatgatctagggggaatatttctttacgtcttccggcttctattagtgactgatactcttcagcatatggcagcataactctatcctctacttctttcttcacgtgcctttctactctacatctctgtctcaaatcttcccctcctttctcttgtaaggataccaataattggactttgggcccatcctaagtccaggataatctcatcttatgattcttaactaattgtatctacaaagacactatttccaaataaggttacatgcgcggctaccaggttttaggacttggacaaaccttttagggaggtcataattcaacccactacaagtaccacttttagtatatttaaatatatgaaggcaaataataatactgtggacaggaaaacacactacacagataaatgacaagagcattaaaaagtgatttttagtattcagccatattcctttttttgatcaaattttaaaatgtgttgagaagctgtgttattagcaagttcctttctgcttctggggttaaaatttactcaaactttggagaccagacttaaagtgggaaaagccatacaatattacaagaattctagagtgttttaaattcttattgatcgggacgtttgtagatttattgtgtatatataggttacaggccttttctttaacattcagtgactaaacattgtttcttgctgtaaccacaaagtagggaggatttgttgtaattgtcccatacaagtaggcaaagctggtcttaggattgcaaactttgctcttcccttctccctcctgcctctccttttttcctcctcttttatccctctttctccttcccttgctgtccttcctttccttgatattttcctcttcctacatcgttttcttccttctttctgccttctatttttttttcctcctgtgcttggcctgagttagttttgagcatctgcctttcaaggctccatgcctttgaagatcttaacaaagctaaagataaataatgatctgaatctgatgctaataaactgaatctgatgcaaagtggagtttctttcctattggagcacttgataaggtgacattgaagtagcagtgggaacagagccaatccaatcaacaaattaaccaggatctcagctggggttttgcaaaaggctacatttctcaggctgtgtaggatttggccttcattctttgacagaatgtggttggtagaggacatgttgtgctaatggagaattgacaatggcaacaatcatggcactgttgtaaacatatcatcttctcttatgaagttcatttgagtagttgttttcatcttcagggtgatgaatttagtgtgacctgtttattcattccgctttggctcaccaccaatttctttccttaatgttttgccttagacatggatataaaattgtcatttctggggtttgtaaattaacatataggaaaattgattacttctgtgcttgtatgagtagattgtgaggtcctttgcataccttcctcactgtatctgttaggagaattccaggagaagtttgcttttttaatcctgtttctgattgagaggattcagcaaagctgatggctttggaatctgcatgccatgaaattcatgccatgtgttaaggcagccattattggaataggagcagtgattaaaattagtcttttgagattttggttatcttactctagagggacaatcttattaagggcatccattttagtattggagatagaatcctatggcaaaattctttatttccatttgtaatatttatacttttagactgattcttatcatgtgtgttttttttcttccattttatatttatctaaatttggaattagtttgtgagactggggatgattttgaagggtctgtcatgtgctgttatttgttactacatgtatagagagactgagaaatgagacaatgtagaggtggagactaaacatttattctatgggaaagacttctgttgcataatgttgtatcatgctcatgaaacctactttcgttgcaaggattatggctcctttaggaaaaacaaccaggcttattgcagctgtcaagtgatgtggttgatgagaactgaagaggtgttgttttgttgtttttcttctgtattgatggtatgcacatatggtataatcttatctttttttgcactactctggcatttataattaggccatttagatgtgttggatttttcagattttgggaggggtaattttgtaccatttctcattccgaattttttcatgtatgggttgtatgttatcacaccatctttattttgatttcttgccccacagatttccttttggaatatctggaggtgtttgtgtctgccttctccaatacagtggattcgttgttgtgaaagggatgtaatcttgtggcttccaagaaggtggtggtgaagcctatattggaaaacctttctcaatcagatattatttgctaattatgttctatagtggaaaacctttctcaatcagataatatttgctaattatgttctatattggaaaacctttctcaatcagatattatttgctaattatgttctggtaggctaattatagactggctcttgaccaaataatttggaaggtgaaaagcagctgctttctgatagatggaatataatgtggttagttgatctttggaatttctttatctttttaagatcactgtaataattcattccaaacacatcaattaaatgctgacttttagccatccgtgtagcagaggatcctgttgctatgcatgaattaatttcttagaagtgattagtagaggttctacttggcttggcaattgccaacaaaaatagaatatgagctttttaaaagaaagccttggttcagatattcatatcgtgtattgtcatcaatataccagtgatggttactgaacaaaatttttgttaatatttcactttttttggaaagcacctttatttgttgattgtatggttccttgtttacatgtgtctctattaaaaaatttcttgaatactcatcatgtccaggcatattaagagtatgaaacttaggtatatttaatcattttagctaagaagcagttgggattggagcagttatgggtagtggaggcttggttggaatatgcttccatttacctttgaaaagcacctttgcatcagtttttcagaccaaaatttctggttagcagtaataaattgatgaatgactatttcagattttacggaccatgactagttatatgtctttgcttcaccagaatgtatgaaatatgatatgtgattctgtgttttattgagttatatacagaaaacatacctgttgatgagggaatgagaatacattctaatagcttgatttttgataggatattttcaaataagcattagggtggctatcaggagatctgatttagggtttgctgtgcccttattgaacaatacctggcacacaatcatattattttagtgaccttgaacacattttttgacttatctgggcctcagtatcctcatttataaaatgaacatattggaatagtttacttttgaagtctttttttgcttaaaaaatccacagttttatttaaggtgaggatatttgcttttgtcatctctttctagtgatgttttggggtttgacattttgaaagaaagttatcattgtggtcaaatttggcttgactcctttaaagataggctgtaaatatttggctgcatattcttgaaatgaattttagtatgactatttggttattcctgtggacagactgttgtgtcacagtgtggttgtatgattgccattagtaactttgaagtaagcaaaggagggttaattgatctatttgtaacatactgtattataggatagtattaaggaagttggaagtgtatcttagaaataatttattccatctccctcatttaacagatagagaaatgtacccaaaaaatttttttaatttatatgcttagcttgtatcagaaaaagaacattgattttattctcattcagtcattcaacagacatctacttgaacctgtcaaggagcctacttttgaagaccaggttgtgaataatgttattaacacttttattttgatgtaaaatagttctgctctagttctgtctctctctgatgaagaaggaaacacctttcgtacttcccaaatatatttggccttcaaatcttggccattctagttcttctttattcagtgcttattgactgagctgacattttatataaggcagcatttaagttacctatattcagtgtcaagtaaaatttcacgctctcaaattgtattgtcaaagtgtgaaatctttctgatgtccttttttcctcactttaataagtgccatagtgttgtggagtactagcactacctcttccaatatagtgggggcacacaggaatgaacaataaatgtaatacatagtgataggtgctatgagaaaaagcatgattagtggatattgatcagtggtgtactattttatataagtggtcaggaaaagtctctctagtaagataatttttgagcatgatgtagaggaagtgaacatgcaatatctggggtaaatagcctttgaagcacagcagcaaatagcaagtatagcaagtgtaatagtcttacacttttaatagcacaccaatactttttttttctttttgagacagagtcttgctctgttgcccaggctggagtgcagtggcgcgatctcggctcaccgcaacctccgcctcccgggttcaagtgattctccttcctcagcctcccgagtagctgggactacaggcttccaccaccacgcccagctaatttttgtatttttagtagagacagggtttcactatgttggctaggctggtctcgaactcctgaccttgtgatctgcccgcctcagcctcccaaagtgctgggattacgggcgtgagccacagcacccagcctacacaccaatactttttaataactaatgtcattattcagagccatcgatattgaatgattacactataattattcagagccatcgatattgaatgattacactataattgaaatgatatacatttattttcaatttgtaatgaattaggccaaataatatattcgtctttagtttcatttaaggcatctagggtagtgtgctttgccttaggctaattaactctaatttttaaagattgtcgaatttttttggtagtctcttcaatttttaaattagtaataggtattgtcaagaaagaaagaaaataatatttaatcagataagtttaaaaaatcctgattttagtaaaggtaaacagattacttatgagtttgtcagaggttttaatatgtgaatatatgttgttaatttccacaatttgtttgactatggtagcctattttatattagcttttctattttgtaaagcagtctctgggtaacactagtgtatctgactgcatatatccccagggtaggatatatgcatcccaagaactgcctattatgatccactaggttataaacataaaatggcagaatatttctatttacttttaaaatcttgagcaatgagaataaaagctatgctaatatttagtatatgggttggtgcttttgccttacctaggtccttacatgagacagtaatatactatttgtgaaataacttgacatgaatgggagttccaaagtgatgagttttagtgatgtcctcatttgtttgcttgtttatagtgtagtatattacaggaattttcttaaacaggttaatggatttagttattattacctagttttaactaaaggagctcccacaaaaatgggaaactatcttaaagtagatcgttgccatgaaacatggatttataatcctactaacaaaaatctgtgtttttgacaattgctgttgattctttatgattaggtagttgaataaattgtgatttagctgtaatatgacaagataaagggcttaccagaaaaaagaataagatgttgataatgaaatggaacctgtttaatcagtaaggtataataaataaggggaattgatgaaaaaggaagtggtagcagtaaatggacaagaactatcagcattctcttttatcctaaatatagttgcagcttaattttctctcagagctccttcaagtgacagtgagttatcctttgcagtcattcacggtgggtcacaggctggcagaggcagtgccagttgcagcacgtgtcttctgctgtcatcttaggcagtaacacccagcaagccagtgtcagaaggggagtgtgtggaagattgtataggaagtttatgtggttcatcactacaaccaacctggcattagtataataaatcccacttgattgagatgtattctttatgtcactaggtttaatttgctattattttctttgggattttagtttttgtatttataaaagagatttaactcataattttcttttcttctaaacaactctgcagattttagtataaggggtatgttgtccaaataaaatatggtagggagtattccttattttcacattctctggaagagtttgtggaagatatctgttaattttttcttaaatatttcttaaaattcacctattaagctttctgtgtgtacagattccatgtgtctggagaattttttgtgtatgtgtttgttttttttagttaatacaggtgcagtttctttaacatatataggactattcaaattttgtaattctttagttttggtaaattgtgttttttattttagtagttttaaaattttatgtaaaatgttatatttattgatatattttgtaatatcttttcatttttagaaatatttatagattatataatgtcccacattcgtgcctgatgttggaagttttgtgggtttttccacttcattatttatcatcttttttaaatttttaaatttttattattttattattattatactttaagttttagggtacatgtgcacaatgtgcaggttagttacatatgtatacatgtgccatgctggtgtgctgcacccattaactcgtcatttagcattaggtatatctcctaaagctatctctccccactccccccaccccacaacagtccccagagtgtgatgttccccttcctgtgtccatgtgttctcattgttcagttcccacctatgagtgagaatgtgcggagatttatcatcttactacttgtttcacttttttctcgtcttttttctctttttgctttctttggcttcctctgtcctatatgtcttttaaaagatttttaaaaatattttccatcatattaaatattccttttgctgtagtctttattttttttcactgtcttttggtttcctaattctgtttccggctctctttcatctgattatgtcatctattgagttattaatagtacatatttcatagatctagaatttctattttatggattccagttctctggtgaaaatctctatcctatctgttttctccatttcccttctgttttttggatgtgttaggaactcttacatacattttaaaaactctgtgataactagcatcgaaaccacctatggacctatctctggaactatttcttttgtcttatctgttttctgtgtgtgtgggaggggggcgggagggggtgtttctttttgttttttctgttgtcatttctgataattttgttttggaagctggacatcatatgtgaaaaactggaaagattgtaggatgttaacagtgtccaaagagacttcatcctctcctgtcctaggtaggtagaattggggtctaatcatattccagtggttctcaaactttgggatgtattagaaatatagaggccaaggcttgttgcagtgacgcagggtttcccatctcttgatccatgtcaagaattggcagatgccccaagggaaagtacctttgccttgtgttatctcacctctcaacatggttttcctttttctcttgtttccctttaattcctcattgcctcagtgttctccaatgcttttaagcaaagctttatatatatatatatgttttctctttgtttccagctgtagcattgatgtgccacaaaccactgaatcattcgtggaagcagcaaaagtctatggttttattattttgaaaacaaaacagaagaaaaactcatggttttagtttcttttttctttcaggaaaaacataaacaagaattggaagacatgaggaaagctggtcacgaagccctcagcattattgtggatgaatataaggtagaggtttgagagtgtttacttttttaaaccttggataactttagtaaaaaatgtacacatgtaggtatgtgcaaacatatacaaattatatgtgtagtcttattttgctatagaatttctttccattcagcaacaaatatccattgaaagcatactcagtggattacaaaggtaatattagacactgttctgaatttgagaaagtttgagaatatttgagaatatagtatcagcaggtaaagaaattcaagtacaaaataatatagaattagttgctagattatcttttttgtctctgctgtggttcctctgacaggaaaaaaattaaggcatgaaatatatcagaaaaaaatattatacctttttgcttttcttttcttaaacaaattagatagatttgggtacactttagcaataacagaaattatcatgtcagtatcatacagtaaaacattaatatttaaaattattttaaaaattattcaattctgtgcctgcataagctgaaatatttaaagcacattgagcatttaatgtcaaatttttatttccctttaaacttcatgttagatcatttttcttttacaagtaattaaggatgaatatgtttttattgaaataaaattcaaacaattctccctagaagtaaccagtattggcagttccattgtatattcttctaagagatttttccatctacttttatatacttaaatgctcataacaagctatatagttttgaattgatttaaaaaaatgttatcttactaaatttactctttcttgctgtatttactcactgacttggagatattttcatgtcagtacatataagcttttcctatttttgttactcttctttagtttttacagtataaatataccataatttgtttaaccatacatgtttacataggcattttgtttttcattgttcattataataataaatataaaaaatccctattacagttagaatatagaaatttttgtgttgttgattaaacttcctcactagacttgttagaagttaatgtcattttagttgataatttagtgtcagaagcttccgtaaatcatttgggccgggcatggtggctcacgcctgtaatcccagcacttcgggaggccgaggcaggtggatcacaggagatcgagaccatcctggctaacacggtgaaaccccgtctctattaataatacaaaaaattagccgggcatggtggcgggtgcctgtagtcccagctattcgggaggctgaggcaggagaatggcatgaacccgggaggcggagcttgcagtgagccgagattgcgccactgcactctagcctgggcaacagagcaaggctccatctgaaaaaaaaaaaaaaaaaaaaaagaaaaaagaaaaatcatttggataaaagtaggaaaaaaagtagatccagaattaagtgaaaagtgtttttttttttttcttcacctagggtattaaaatagtctactagatatgtcttaggacatgaaaggccatttttgtgaccatacccaatatagtagttgatgctcattgttaaaaaggtcattaaaaaatgtctgattttggcagagcatggtggttcacatctgcaatcccaacactttgggaggccgaagtgggtggatcacctgaggtcgggggttccagaccagcctggccaacatggtgaaaacccgtttctactaaaaatataaaaattagctgggcctggtggtgcacacctgtaatcccagctacttgggggaggctgaggcaggagaattgcttgaatctgggaggcggaggttgcagtgagccgagattgcgccattgcactcctgcctaggtgacagagcgagactccgtctcaaaaaaaaacaaaaacaaaaaacaaagtctgatttttatagcaatgataattggcccttttataatgtttttaatattttttctgttaatgtaaaccagttttacagttattgagttgaggaaaagtcctatattattatagtattgattttgtcaacttattttatccctaacgctgagggtgggaggaattaaaatacaattggcctaatatatttgcagattccataaccatggatgagaaatgtttggggaagaaaagcaataaaaataacagtacaacggtaaaaagtaacacaaattacttgctatctagaaaaagagaagcatacggtaaaataattatcacatgaacttctcatgcatgaatgtaggatcaggaagaaaatcattccacttcttgttctgtaatgtaccacaaaccatcaacacattatgattttttctatatgaattattttaccttttttccatattattatgaaagctgattctcagcatattttagaacaccttcgttgcaaaattttacatgatatccaatatatctgataatatttctcctcagagtactataatattattgtacaagatgtggaattcaacaagtcatatgattaatcaatatgcaatgaattttcactgatttaaaagtatttatatcctttgactataaactgactgtgagctatgaaataaaaaattaaatataacttcgtaggcaatttgattgaattcctaatccattttagcaagtcatcttataacatctgaaaattttacatttctctttaactgagtgctaagtaatgacgctggacaaatatgtaaaatgagtagctcttaaccaaatttcttcaaaatgccatttgtaaatactagaatagttttcacttatgattttaacctccttagttaccagtattgaaatttataccaataaatacgtttgcagcgaagaaaatattgtggagttagaaccaaaaaatgatttaaaaacatcaaaagcaacctgtttagaaaaacagctaagcacactcacaataacaagaaaagtaatttttcattaatatttttaaagccgtattttactgtagtatatgaaaatttgatagatgatttgttaattattaggtatttcaaaaggaaaccaaaatatctctagttactattgttaacaaaagttgtgtgaacattctctttgcatttattcatttcttaattcaacaaagattattcattatcttctttataccagggattattgtaaatacagcagtgagcaaaatattccaatccttgtttcagtgggatataattccatatctacattccatgactacatataatatttaggaaggaaggaacttaaagtcatagcattccttgacatttcagttttcagggcttcacacttttacctctccctcccctgtaaatgtttactcaaatatgcaactggaatagaaaaatctgttactgtctcaccaccagtcctggctcctggggatcttacgtctttctagttatcctggactagatgtaatcaatcacttttttcctgtccctgttgagctgaaatattgttgaggagtttgaaaaaatgctccttagaaaagaaagtggaaaataccaagtaaagtaaaacaaaaatggcaaaagcctaaaatgtaatgcataggaagataacttatgtttgtataaacctctgctttcagaaatatgaagacatgactttttatatttttcctacttagtacagattaaaaaaaaaactggatattttatataaaaatatagtccctgaaataagtccctgaaagtaagacagaaacaggcagactagctaggaaccatgacacccaagtaactacatagtagtgggttccccggattttctttttaccctttttgtcccactaaagcactggagaagtgagtaacccagaaatagcaatgggcgtatagaaacaaacctcacgaaaagcctgctttctctaaccaaaagcctccacctagtaagacagaaaactattagataatacccattctacttccaccaagtaccataggaagaaatggcagtgaaggcttgttagagagagaacttagattttcacttttatcagcttataaatgaggaactcttctatctcctcactggggtggtgttaatgaaggtgaggcagggaactaggactttaattcatgctgggcaataagcccccttcctacgagtgtcgggataggccatctaggaaactagacttctgccctaagctggcgttgatgaggtattcctcccttactgtgttgggaaggtatcaagggatacctaatgggaatcaagactgtcatttctgcttggtagtaatgaggccactcctctgtggtttcagtggatggtttgtggggaacaataatgtggtacccttactcctcacagccggactggtattggtggaggcctggtgggaagctgaactcccaaccatgtccagaaataacaaggagatccttgttccctgtatgctgagtgctagtagaggctgagttgggtacttagacttccaccctacctggaggttttcatttttctcggctggagtggtgtcctgtcagaagaaatctcctgaaacatgatttcaaacgtctagatttcaattaaaaaatacttatataatactcatatcaggaaccaagaatattttgtcttgaatgaaaaccaaaaaggacaacagatgctgaactgagcagattccagttttagaattatttgtcaagaattttaagtatctgacaaggattttaaatcattaattacaaaaatgttttaacaagtgattatgaacattcttgaaaccaatgtgaaaacagaaaatacccgcaagtgtcagcaaagtaatagactgtatgaagaagaaccaactggcaattttagaagtagaaatacaataaccaaaattaaaaactcagagatgggctcaataatggaatggagaaataaggaaagaatcagtaaatttgaaaaaaatagaaattacccaattcgaacagtatagagaaaacaaactgaaaacaaatgaataggggtttaggaatttgtgggattatgatgaaagacctaaaatttatgttatccaatcctggaaggagtgaagaaagaaggcaaaacttaaaaacattcaaagtaagattagctcacaatttcccaaatttggcaaaagataatactgcatatttcagaagccaaatgaactgcaaatatgataaagacaaaaacaaacaaaatgcatgtcaccacccactataatggttaatttatgcatcagcttgactgggcaatggtttctagatatttgagcaaattttatttgaatgtttttgtgaggatttttttttttaattcagataagattaacatttacatctgtgaactttgaatatggcaaatttccctccataatgtaggtgggcaacatccaatcatttgaaggccttaacagaacaaaaactgaccttccctgaacaggaaaggattctgccaatagactgcctttgggtgcaagctgcaacattagttcctttctgggtctccagcctgtcagccttgtttgcagattttgaacttgatagcctgcataatcacatgagccaatcccttagaggaagtttttctgtgtatttgtacatatatggatttatttctctggagaccttaatacacacgtagctaaacttccctcaaccaaaaattgaaaatctttaaagcagccagagaaaaatgatattttacctacagaataacagaaatatgatagacgtttcatcagaaactatggaggtcagaggaaatggaacaagtgctgaaaaaagaacttttaaccacaaatttcatatccaacccatatttttcctttaattcttttgttattgaataacttatttttggtgactctaattcttttaaaattactgaggcttattttatggcctagcctctgatctatcctgtgcacttgagtaaatgtatatcctgctattgttagatggaccatactccagatatctatggggtagatggtttatagtgttgcttaggctttctctatgcagttgataatctgcctaatttttctagcctttatttaatgtggggtggtgaaatctctaaatattattgttgaattgtttacatcgcttttaattctgtcagtttttacttcatgcattttttggatattttgttagttacatatctgtttttagttgttacatgttaatgttagtttgttttcatactgttataaagaactactagagactaatttataaagaaaagaggtttaattgcctcacagttctgcctggcttacaatcattgcagaaggtgaaggagaagcaagcaccttcttcacaaggcagcagtggggagagagagaaagagagagagagagagagagagagatcagaagtgcacacttttaaaccgtcagatcttatgaggactcactgactaccataagaacagcatgctggaaatctgcccccgtgatccagtcacctcccaccaaggccctcccctgacacatgggaattacaaatcaagatgagatttcggtggggacacaaagccaaatcatgtcattctgtccctggcccttcccaaatctcatgtccttctcacatttcaaaatacaattatgccttccaatgtcccctaaaatcttacctcattgcagtattaacccaaagtccaagtccaaagtctcatctgagacaaggcatatcacttttgcctatgagcctgtaaaatcaaaaacaagttagttacttccaagatacagtggtagtacaggcattggtaaatgctcccattcaaaatggaagaaattggccaaaaaaaagtagctacaggccccatgtgagtctgaaacccagcaggacagtcattaaatcttaaatctccaaaatcatctcctttgactccatgtctcacatccaggacattctgatacaagaggtaagctgccaaggctttgagcagctctccccctgaggctctgcggggtgcagccctgtggctgcttccacaggctggcattgagtgcctacaggtttttcaggcatacagtgcaaactctcagaggatataccattctggggtctcaaagatggtggtccacttctcacagctccactaggtagtgccccagtggagactctgtgtaggggatccaaccccacattttccttctgcactcccctagtagaggttctctgtgagggctcctcctctgtagcaaacttctgcctcgacatccaggcatttacctacatcctctgaaatctaggcaaaggctcccaaatctcaacccttgccttctgtgcacctgcagtgccaacaccacattgaagctaccaaggcttggggcttacaccctctgaggcaatggaccgagctgtaccttggccctttttagccacagctagagctggagtagctgggacagtgtgccatgtccagagactgcatagagcagtgcggccctgagaccatcccacacaaccatttttccctcctaggcctctacgggctatgggaggggctgccatgaagatctttaaaatgccctgaagacatcttcccactgttttggctataaacattcaactccttgttacatatgcaaattactgcagccaacttgaatttctccccagaaaatgggtttttattttctattgcatgttcagtcagtctgcaaattttccaaacttttatattctgcttcccttttaaaaatgagttccaatgtgagatcatctctttgtgaatgtatgactgtgcactttcagaaaaagttcacttctagaatgctttgctgcttagacatttcttctgccagatatcctaaatcatgtctctcaagttcagcattttacaattctctagggcaggggcaaaatgctgttgagtctctttgttaaaggatagcaagagtgacatttgctccagatcccaataggtttctcatcctcctctgagaccacctcagcgtgggcttcattgtccatatcagtgtcagcattttggtcaaaaccattcaacaagtctccaggaagttacaaactttcccacatcttcctgtcttcttctgagctctccaacatgtttcaaccttcatcttttacccagttcccaatttgcttccacatttttaggtgtctttatagcagctccccactcccagtaccaattttttgtattagtcagttttcacactgttgtaaagaactacttgagactgggtaatttataaagacaagagatttaattgactcacagttccacattgctggggagacctcagaaaacttataatcgtggcagaaggcaaaggagaagcaagcaccttcttcgcaagacagcaggagagagagagagagcgaagtgggaagagccacacttttaagctgtcagatctcatgagaactcactcactatcatgagaacagcatggaggaaatcgcctccatgatctaatcacttcctgccaggcccttcccctgacatgtgggaattataattcaagatgaaatttgggtggggacacagatccaaaccatatcaatcttcctgatggattcactctcttatcatatttttttatctctagtaagattttttttttggtataaagtctatttttttctgatatttaatgtagccactcccattctattttggtggtggtttgtatagcaggggtccttaacccccaggctgtggaccggtaccatttggtggcctgttaggaactgggctgcacagcaggaagtgttggtgggcaagcaagcattactgcctgagctccaccacctcagatcagtggcattatattctcatagccatgcaaaaccctatggtgaactgcacatgtgagaaatctaggttacatgctccttatgagaatctaatgcctgatgatctgaggtttaacaatttcatcctgaaaccatccgctttaccctagtctgcggaaaaattgtcttccatgataccgtttcctggtgccaaaaaggttagggactgctgtatatattttcccatccttttactttgaaccaatttgtgtctttgaatataaagtttgtctcttgtacaaatagaattatatgcatattattttaaacaattgctttttaaatcagttaagaaaagagaagcagcatccaattatgctgtcatttaaaattacccttataattactgctccctccataccagtgggttctgcatccatgaattgaacattgtattcattaggtgagaaatccatggatatggagggccacatttttgtatctgcaggtttcacagggccggaggcttgaacaatctcagattttcgtatcctaaatggtcctggaatcagtccctttggatatcaagtggcatcactacctttactggcatgctttgtttttcacatagatcaaattactatctggagctgcttgcattagtgtgaagaacttcctttagtatttattttcttcttcaaattttatggttttgggtcttagatttaagtctttaattcatcttgagttgatttttgtgtatggtgagaaatggaaatccagttttattcttctatatgtggatatccagtttttccagcaccatttgttgaatagggtgtcctttcctcaatttatgtttttgtatgctttatcgaagatcacttggctgtaagcatttggctttatttctgggttctctattctgttacattggtctaagtatctaattttataccagtaccatactgttttggttactacagctttgtagtataatttgaaattcggtaaatatgcttccagatttgttctttttgcttaggattgcttatttgggcttttttgttttatatgaattttaggattattttttctattttgtgaacaattatgttggtattttgatattaattccatagtatctgtagattgctttgggcagtgtggtcattttaatggtactgattcttccagtccatgattatgagatgtattctcatttgtttgtgtcattaatgcttttttttaaaattttttagcagtgttttgtagttctccttatagagatctttcacctacttggttatgtatattcctgggtatttaaattttttttttgtagctattgtaaatggattgtgttttttatttcattctcacctttgttgttattggtgctactgatgtgtgtacattgattttgtaacctgagactttactgaattcatttatcaaatctaagagttttttggaggagtctttggggttttccaggtatgcagtcatgtcattggcaaacagagatagttcaaattcctgttttccaatttagatgcactttatttctttctcttgtctgattgctcttggtaggacttccagtactgtgttgaacagaggtagtgaagatgggcatccttgtcttgtttcaggtcttagaggaaataatttcaaatttttcccattcagtatgatgttggctgtggtttggcatgtttggcttttattactttgaggaatgcctcttctgtgcctagtttgttggggtcctttagtatttattataagttgtatctcctaacaattaatttgtgtattttttcacttgcattctttaaagttagttatttaaaaaataagattgtaggcagtttttgttcgttgattttagtactttgaatatgtcatctcattgccttctatcctacatatgagaagtaagctgttaatctttttcagattctcttatacactatgagttatttttatcctgttttcaaattgtctgtttttcacttttagtattttgactgtgatgtttctaggtgtgtgtcttttcatttattctatttggaagtcatttagcctcttatatgtgtagattgtttttcatcaattttgggaagttttcagccattcatattttttctcctacttctcttttctcatgtgttactttcattatgtatgtgttagttttcttaatggggtctcacatgatttttaggtgtagtcatttttgtttgttatttatcctttctctgttcttcagattgtatgatctttatcagtagttcttaaggtttactgattctttctcctcgtaactgacatctattaatacaagtttctatacatttttttttgaataaatgcttctcaatttgttgtaagacctttgatcaattttccagagactgaatgattgctttgccagtttaccttgtcacatgatttggctgtgtccccttccaaatctcatcttgaattgtagttcctataatccctacatgtcgtgacagggactcagtgggatgtgattggatcatggtgcagtttcccccatgttgtcctggtgatagtgagtgagttctcacaagatctaatgcttttacaaatgtctggcatgtcccctgtttggacttctccgtcccgccaccctatgaagaaggtgcattgcttgcccttcaccttctgccatgattgtaagtttcctgaggcctaaccagctatgcagaactgtgaatcaattaaacctcttttcttgataaattacccagtcttgtgtatttccttctagcaatgtgagaacgaactaatacaccctacttaacagatgacattctggagtagaggttccccctgctagctcctcatattgccattccagaagttccacccccctttccttgttttttaatccaaattaaaatagtggttactctgttatcaatattctttatttcaaaaatgattatcctgaggtcagtattatgaaagactcatgacattctctttattctcagtgcattgacaaaagttgagggtttgtttacgtcatctggtcgtattggatcacctcaacccatggatctttgctgatttctttttccaattctttttttaaaatgtaggactgttcttttgcatgaataatttgagattacacatttcatgagtttcagaatatatattttgggtttatcatttaaaaaattgctgttgcttcaaatattaatttaaaccttaataaagtgccatatttattttcctcatggataatcggataaaacaatatcctaaagcacatttttattagcaatatcttatgtacctaacaccatttaaatgaactagcactttttaaagctcccaaatcatgtgatcagctgtttctgatttaaaaataacagtaagttatgataggacttaaacttttcacaaataattgaacattctgattcacctagaaatagtcctgtatttaagagattagctgacctcatccaactggaatttacttattttgagtatgtaactctgtgttcatacaactttaaatcatctattccaggagctggctaaagaaaatctgtaacccaatccatgtttaaaccaatttaagacctaaagttattatgttctattaggcctaatattcttattctgtctttagtgattttatataataatttatagacctttattctttgatttcctgaaggaatgttacatgcctgccagaatttatactttgagactgctaagtacttctgttagtagagctgattacgagcatagatttttgaattcagacagacctggatcagagccccacttctgctatttactaatattttgaccttgggcagtttttttttttaaactattttagtttcttcttcagtaagtgatggaataaaccatggaacctattcataagagtgttgtggggatgcagtgagaaaaatgaatattgcatggctaataattaagctcttaagaaatattaggtattatcattatcatttctatatgtaacatgtcagatttttttagtgtagcaattgcaatactttttcattatctcatagctgatcattagttggttgtcttcgtatagattcttatttcagtcttcttagaaatatccacttcggaataaaagattgtggcccatctcttcaccttcttgggctcagttaaaggcagcattctttcgttaactttgaaaataaatagattgctacagattgatgaaaaggacgtgaaattttgttgaagtacaaaagaaaacaaacaaaactaacctaatgtgcctcatatgccaaattttcccatgtttacttaatttttttctcttatgtcatgatttcaaaaatcttttattctgataattaatgacagtaaaattaatgtacatcttggaagactacataggcacatgccacatcgaagattgtttactgcaagcaacataagaattttcctttacttgtttaattgggcttttgtcttgaacttgtcattctctaatatatgcactcgctcagacttcatgagttcttaatgtctcatcttaatgttctccatcaaagattaccatcttatctattatgtagagtatcatatttttgagataatgaggaactgtattagcatgatccttttttgttttaaggtccactcaacagttgtgattgatcaggttactttaatcctttgattctcaacttctacagtgcatagtaaattatttgtgttgctttttaaaaatgcatatgccaaggagttttctttcctggaaattctgaatctgtagatgtaggtaggggctagacatttgtcgagtttttcttttttaaaaaaaattctattaagttattctgctaccccatgggaattattaaccattgtcctatctttttatatttgttggtcaatgtattctattttctttcagccattatttttctaatttttgttattaattaatattgagtctcttaaggttttgtgggtgggtgtgcatacgtgtatgtgcttatattgtatcccattgaaattactgagaatttttttccatataagaaagatgaaacaaaccctaacagaaaccaaatgagtgtatgatggactgctgtttttaatacttaagaaaaaagtgagttttagctgtaactaagaaacaaaaacttgtcctacgtcaagattaaaaaaaacaaaaacttattccttgttttccttgatgtgggataagtgatcacagtaagaaaagaattctttatagtgcaggattggtataatagcacagagggactatcaaagaaagtcatacatggaaaaaatacaggcatatttgctaaaatagatgtaacattatagcttaaggaatatgatgccttgtatttttaaagagaaagtatctttttgcatagaggtgtttacttctcatttttcttttcagaactttctccgtatacatctattcagttaataaggtagatattagtgcttgaggtaaagtcaattcaaatgttaactcattctcaaaatgactgttctttgcatcctaaataacatttgggaagaattttccaaaggaagtatttagttgactcaatcagtgtgttaaaattcaaagttggaattcctgctaacatggtacaatagtgagtggaaagcactcaagaaattaagttcaacatgttgtttttattttgtctcattttgagctcagttcattaaaaattccaacttgatgcaaataaggtatgaacatttaggttaaaacttttgttttgctactgtgtaaggaatctcttttaaggcaatgacagctgcctcctctcttccccctattttttttttttttaatatcgtgtttacttaaagatagatcagttagaaaaggggctttcccttttgaaactctcatctagagaggtttttaaaatttcattctgtagtgattttcacaagttgttttcgtggttctggcttgccttgtttgtttttttgatgttatactccctgttgttttcgttttttaacttaagggatttagacgtttcacaaattataccacataggaaaagtgttgaaacattatcgaattttgatgtagttgacagattaaaaagaatgctaagtagaaaaatagcctgaaaaaggcaaaaaagaaaatgtagtttgttttaatattttatgcacacaccagataaattataactgtactgatttaaaggcgtatttatgtttcttggcccatctgtgggtgcctaaactaaacattctctgtattgttttttggacatgtgaaaattagttacttattattacattcattttgaaaccagaagggtttattttttaatttttttatatcatcttctcaaactctagggttttcccctctggtattttgtttgcatgcatttggccaagcagaatacattttaaaaacttatcattataagtacctatacatttcaagatattgccactacagctagacatacagacacacaaactcattttgcatttgcagtctttgtttctgatgcttgactaagttggtgatctttaattctgtgtattatattccagatggcaaaaaccagtcaatgctggtcacttgaatagtacttataaatactttaccatcttaatgagaaagtaaggaatgaggagattgttttctaaagctttacttagatcattttatgaagataattttctgatatttttctcttcctcttatatttaaatattagggtattgaattaggtacaatgaagttttaacttattaggcacatgaaatttctgctacttacagtgaaaaaagatgcaaaattgctacatacactttagtagctctaaaatcattgtgatgaaaattctcagtatactaatttcctatgttaaccaaagtttgttttgttgagagttttggtcttttgtgcattttctgaaaaggtcagatatatgctaaatactttttgttaaggattgctttgaattttagcaatgtaaaatatgtcacatgccagcttgagtatcacatgactgctgtattcttatttttcaaaagcatccacttgctagtattttatttgaactcttaaattgtttgtaccgttttatgaaggagaacatattacatttaggagaccaatattttcccagggtgtagagttacttgtattgtataaagttcttttccaaggagagagaaacaattttgttttctcttcctttgatattttcccttgattggatattgctaagtttttgctcaaagagaggaaaagtaaaaattaagatatgtaagacctgacagcatatctttatttgaattccaccattttgttaatccaaaggtataaaataaatttatagtttcagttatttgattgaataaggattctcataaattccagcttttatcatatgatcagatttttcctggacaaataaagatgtttgctgttgccaatagagtttggcccactagcatgctagctagatactagtgattggtttggagctaaggacttggcttgtcctttcttatccctcccaccaacttaacctcagtggaggattgagaaagatttggtagttgagaatacttctgtgtgcctctgtgtttcctgggcttagccagaactttgcatgcacagctattcttgtggtttttcaagccaggccaaaaccaaaaggtattggaaaccttgccagaagcctcattctaatatagatttaaagcttgcctttatactgtgactggtccattaggtgatagtcaaaggaatgaagaggaaaccttcattctattttaggaataaaaatttcaagtttctgttgtgtagcagacttttaaaaataattccaaagataaaaaaccttaagatgtgtagagtttacataaaaaccctagaagaaaacctgggaaataccattcaggacataggcatgggcaaggacttcataactaaaacaccaaaagcaatggcaacaaaaccaaaattgacaaatgggatctaattaaactaaagagcttttgcacagcaaaagaaactaccatcagagtgaagaggcaacctacagaatgggagaaaatttttgcagtctacccatctgacaaagggctaatatccagaatctacaaagaactcaaacaaatttacaaaaaaaaaaaaaaaaaccataaccccatcaaaaagtgggcaaaggatatgaacagacacttctcaaaagaagacatctatgcagccaacagacacatgaaaaaatgctcatcatcactggccatcagagaaatgcaaatcaaaaccacagtgagataccatctcacaccagttagaatggcagtcattaaaaaggaaacaacagatgctggagaggatgtggagaaataggaacacttttacactgttggtgggagtgtatattagttcaaccattgtggaagacagtgtggtgattcctcaaggatctagaactagaaataccatttgacctagcaatcccattactgggcatatacccaaagggttataaatcattctactataagaacacatgcacacgtatgtttattgcagcactattcacaatagcaaagacttggaactaacccaaatgtcagtgatttagttagtaacttaacccagtgatagactggattaagaaaatgtggcacatatacacaatggaatactatgcagccataaaaaaggatgagttcatgcctttgcagggacgtggatgaagctggaaaccatcattctcagcaaactatcacaaggacagaaaaccaaacaccgcatgttttcactcataggtgggaattgaacaatgagatcacttggacacaggaaggggaacatcacacaccagggcctgttgggggttggggggctggggtagggatagcattaggagaaatacctaatgtaactgacgagttgatgggtgcaacaaaccaacatggcacgtgtatacctatgtatcaaacctgtaccttgtgcacatgtaccctagaacttaaagtataataataataaaaaagatgtgtagagtttagttagttgtttcagacatgtaagaactcttttccctctcaataatttttcacttactaaaatgaacttttctgttttatactacatcaggttaatatttgtgactaatgttgctcagacctgaatgttgtagcaatgtgagtctcattctatcagaatattcttgattaattacagatttctgctcattataacaaattcaggccactgtatcattagtttcttccaagggccataataagattatttattcattttgacctgattgagatttgacctgttctgatgcagttgaaagtttttttcgaatctgtttctaagcttgttcaacaggtttctatcttcagtaataatgctggaggactgattatacagtagcatttgtaaagggcatatttctttaacaatatcaatcaatataatgtcaattatttagtttttagtctttcattattctaatgaactgaattatcagtaaggtctatctagattcaagcattttcagtattagagaaaagcactacctaattatactgcaggaaaagtacttgtatgtgtgtgctacagatttatttttatttattagccaccaatatttctgtttgtgaaaggccacacaatatagttgttacaggcaagggagataaactgatgaaatttagacatgcttacactcattaaggatatatacacaaaaaactatttgtaaagatgatggtctgtaaaagtttacttttgatttttaaatttctttccggtttgaatagatattgagaatggttaaatttattatttattctgaactataaaacagactgaaaagaaaagcagagatgtaataattaatgtgagagagaatagcattttaatatgtctgttttgtttctgattgcaacccaatattaaaatggatgttttgtttttaatccctaccttctaggtaatcaactttgggaaacctgatttatgagaatattgattttataccaaggataaattaataggggatataataatttgccttatcaaaatatcatttttttttgtcatggtaacatatgcacttaatgcaaaattgaaaagatatagaattatgtattataaaaattaattttgctcccattggtatttgcgcatcagtcttctctttttcctttatcttttccagagatgggataatatgcataaagttgtcacatttctgattttcggtaatttgactgtcaaattgctttatagcaatcggaggcaaattccatttgagaactaatccatagtctgctttagttcattttactcagttcatcaagttcaaaggttactgtattttgttgttttagtaggatattcatgtagccaatttttttgataattttgtaacaacccaatctgagctgttgttaaatcagcaagcactacttggtgccattttattatagtgaggtatttccatatcatttactatagtaataattaccctgagccacttggatggctttgtcccttcctctgaggcttcttctcaactcacagtcaaggtggagcttggaactgcaggggacctctggccctgtatctgttctggggatggcatctcttctaattttttgatgcccaaactgatggattttaaatatttttattcacccttaatgtaatcacatctgtcaggtaccaatggtaactttaaactgagaaataactaatagaagtatttatacttgttatctaagttcacaaactcattcacttagtctcacaatctagtctgcctcaaaatttagtcttaacatgtttgctgtaataacattgatttaagtcaaacctgtaatctcttaatgttgatggcttttcagtatgaggaaaagttctaatctttgagatctatattttatgaatggaactgaattaattgggaggaaaatactaattttaaaataatatttataataaattttaaaatatttattttaatcatcataaacctagtaattaaaacaataatgttgatcctaggttgaatccacagaacatgaatttcctatgtcataaaaagtaggtaatttaactctcaaacaacaaactgttagaatacaggatttcaccattaatgtaaaaaaaaattaagtgtcataatttgtcagaatgccttcatcattgggagagaagaaactcttcttctcctcatatatgagataaaatgaggaatctaatacatagagaaacatggtgccttgatggaacacatgtaaccaacagaagaggagttgtaaataaaagccacatcatttaaggcttgattcagggctcttttcaagagtataccgcctccttgcaaagttaattcatatgtatttaaacaaatattttagacatctagatgagtttatttcttcccatgatcagtgattttatatttcagaaaatgagatgcataggcctttactgtattaataactaggtgctctacttaattgtatgaatgattatgaagaggttattttggtcagaatttttttttccctttcctttttttaaactgaaactgtagctcttattcaagtcacaaggaataatgtggcatctgagggagagggatatccatatggcagcctttcaaaaggttaaagtatctggaaggcagacatgcagagtctctgtgctgtacttaattttagaaacttcttaattttaatgtgttgtccatggcacaaaagaaattttcactgggagacttttgtggtgtttgaggtaacaactcttatgttactagattcccttaacaacaaggccaacaggaatgattccctgtgtcctgaagattttctttggctttcacagcttccaaggcactttatagcgtggctagactttattgaattttcatgtttagatctacacccataagttaacattttcctttttgaattgtgtagtactactgcactgtaattcaaatacacagaaaaatctgagattcattgcaattccaaatgcttcagatctgtaacaggataaattttcagcagcctcaacttgaccttgctacttctcttccttttttaaattaaggaaaaatttggaagggagaacttgtttgtttcttaattcagcttttccaaaattttaggtaatagtttccatcactatcactcttcagacaactgtaatttactcttgagaaacatgtaccttcattcttcccaaaggttgagttcacagagtctggatgttgcctaacttctgcctggctgggctgcgggagaccatgatcctggacttgaatttggatccagatttgagtaaatgaaatttttaaatctaaattgagtgtttgtcccagagaattacaaagaattttacattgaacttttagatcatctcttgatgatagattttactcatattatttcttttatattccaccaaaattttctgaaacgtctaaatactgttttcagagatgcttaatgtttctcctctaatacaaccatgtacctcagagattattggttcactgatctgaagctctttgaaaatacatggctatgtgtgtatttgtgtgtatgcataattaaatcaagctatcagtttattcttctgaattataggcaaacaaagctatagattgaagttttagacctccaaattggctaaagatatatttaattaagccaagagccattggggattaagacaagttggtaaccaagaacagcattcagggccaaatctagtcatttgccatcatttggatactatttcttcattttcatagtctttttttaaccagtctcttcatgataaaatggagaatgtaagtattgcagaagaaatgtatattaatagacaaagtatccagatgaggttcaagtaattattacttcatagatgtacttgcagtaaatatataattattactgatagtaagtatatttacagtactgcttgcaagaacatgtaaaaacataaactcatgtagttcttattaggattaactctttcactaccagagagaataattgcattatctttaattctagagcatatacaaaaaagttcatgcatggtgcatgaattatcagtttctaacttccatgcatatgtgtagcccaccaaaatcaatgctacatattttcattcttacacgttgtccattaatggagaaaattttaatagcatttgagtgtctttggtatttttccagtacctagaacagtgtttaggaaaatatttattgactaaatgaataataaatgaataattgagtgactgataaaaatgaaatagctgcttagtccacgaaaagagaaatctgctttactgggctagaaaagctaagacaaatggaaacaaatggttaaaactgattttttttttgtaccactgtgtcttttcatgtgattttggccatatttattaaccacagtgtctgtcttcatttgtaaggcaggtatgtaaagttcatggaggaaaaatagatgaatgattctgtaaaacgactgcgattcatcatttttacaaatgtacctcattcaagtaggctctctttttgaataataaacttacgatttgtttgcagttttgaggggatatgataagacatgctaacaatttaatatccttacaaaacttgaagtaatattttgctgaaaaaagggcttgtaccagaaaaaaaacataaaaatatctcttcatagctttagcttattcatttggcagatacctttcagttttgctcatgttatttttagttaaaaatgagaaaacagaagaaataatagaaataaattttttaaacgatagaaaaaagatgtttaaataatttgtgatatttttccaagaaaggtgaaattgtggttgatttcagatgatactttatgattattttgtatatactattatcctcaagctaaactaagtgtataattacaggtataatcaacataaaagttttaataatttctgtatgaagggacaaataatcaggcttgcctaaatcatgattaatttgtttagttactcaatgtatttgtcatatatcttctatgtgtcaggcactgttgtaggtgcattgggtattatcagtgaggtaaacacagattcctagtctcttaggtcttaaattctagttgagagattatatttgttatacgttttgcttcctgcttgcactgtatctttatattgttctccatttgtaaagtatgacttaatgggttgttagataaaattattttgtgactttcaatataatttaattattgttgcttacaattagctatgtaggattcttttatggtcacataatcagtacaaagatgatattaatattttgaagaccttattccttagacacatctgctctgcaaatctggacaatcatttaatttgatgaggctggaatcagatctgaaacaatggggctatttcaagggaggagaaatctgtggatttgttgggacaatggactgtagtctgggttgcagtagtctactttggctatacttatgtcattcaaattccagcatgcaatcagttccactaaagaaatacacatctaattctcacgtgtattaacagttggggtggtgtggcatgatttttgacttaatacctttgttttctatgagtttataatatacttttccttcccagaatttatagtccttcacactatttactcacagttgagcccgtggagtaaaaagaatgaatatttcttgtcttagataataacttaaaaaattgagatctctggtcggtaccaaatggacttggtaacaattttggtgacttgtcttggtagttataatttgtagcttagtgaacttttcaataaatattggtactgttgatagtatatatttatgtaatatcagttttcacacagggatcattacttaccaagtagctattacatcagctggttatgtacaaggcagtctaaaaagctgttcatgaagttatagttcccgtattaagagacctacaaattttttaacactttaaaaattattcttttttcttttttctgagatggagtcttggtcttgtcgcccaggctggagtgcagtggcatgatctcagctcactgtaacctctgcctcccgggttcaagcgattctcctgcctgagcctcctgagtagctgggattacaggtgcactccacgatgccccactaatttttgtatttttagtagagatggggtttcatcacgttggtcaggctggtctcgaactgccaacatcgtgatccgcccgcctcggcctcccaaagtactgggattacaggcgtgagccactctgcccagcctaaaaattattcttaaagtgtgatagttttcctcaagtttagtgaattaaatcctcttggataatactacaaatctctgataaaactgtagctaagacataaatatgttcaaaatcaacaaaacattttctgcccttgatagcattcttttatatatagaatatgttggtatgtatcttggcatttctatctgtatatactgtgagagtcttaatgctttatgggtgtttagaatagttgaaaatagattagaaatgaaattattctttcatatatctttttttaatgttgtagaagctcaaggaagcctctttgtcttgggtatctgtagagacagttacagaagaagacaatcagcaaatgttaagattatattatgagatgtgagaaacgtaaaggaatctctgtgtattatgatatattaaactggaagataaatattcagttatacaataatagagcaacttataaaggcatgtggctagtatcaatgtgtatttgtatatccacagtgcttaatctaatagtagggacagttttggaaattaccttatttgcttggactgtggcactagtaatcacacaatgttgagccataggaccaatgcttaaactccttgttgttatacaagttcttttaatacccgacacctgccttcttgcctaatcatttagctccactcttaactccagcttctgtactccagctattagttttgtttttaattttttagttccataggattttggggaaacaagtggtatttggttacaagagtaagttctttcgtggtgatttgtgagattttggtgcatccatcatctgagcagtatgcactgaacccaatttgtagacttttatccctcacccccttcctaccctttcccccaagtccccaaaatccactgtgtcattcttatgcctttgcagcctcatagcttagctcccacttatagatgagaacatgtgatgtttggttttccatttctgagtttcttcacttagaacaatagtcttcagtcccatccaggtttctgtgaatgccattaattcattcctttttatggctgagtactattccatcatatatttataccgcagtttctttatccactcgttgattgatgggcatttgggctggttccacatttttgcaattgtgaattgttccgctataaacgtgtgttcaagtatctttttcgtataatgacttcttttcctctgggtacatacccagtagtggtattgctggatcagatggtatttccacttttagttttttaaggaatctccacgctgttttccatagtggttgtactagtttacattcccaccagcagtgtaaaactgttctcttttcaccatatcccttccagcatctattattttttgattacggccattcttgcaggagtaagatggtattgcattgtggtttgatttgcatttccctgatcattagtgatgttgaacatttttttcatatgtttgttgccatttgtataccttcttttgagaattgtctattcatgtccttagcctactttttgatgggattgtttatttttttcttgctgttgtaagtcctagccagagcaatcagacaatagaaagaaaaagggcatccaaattggtaaagagaaagtcaaactgttgctgtttgctgatgatatgattgtatacctagtaaaccctaaagactcctccaaaaagctcctagaactgataaattaattcagcagagtttcaggattcaaagttaatgtacacagatcagtagctctgtcatacgccaacagcaaccaaactgagaatcaaatcaagaactcaaccccttttacaatagctgcaaaaacataaaatacttaggaatatacctaaccaaagcgtcaaaagacttctacaaggaaaactagaaaacactgctgaaagaaatcatagatgacacaaatggaaatacatcccatgctcgtggaagggtagaatcaatattgtgaaaatgaccatactgccaacagcagcctacaaattcaacccaatttccatcaaaataccacctttggagaaagcaaacaaaaacaagtggggaaaggacacccttttcaacaaatggtgctgggataattggcaagccacatctaggagattgaaactgaatcctcatctctcaccttatacaaaaatcagctgaagatggatcaaggacttaaatctaagacctgaaactataaaaattctgaaagataacattgaagaaacccttctaggcattggcttaggcaaggatttcatgagtaagaacccaaaagcaaatgcaataaaaacaaagataaataggtgggacttaaactacggagcttttgcatggcaaaaggaacagtcagcagagtaaacagacgacccacagagtgggagaaaatcttcaccatctgattcaaaggactaatatccggaatcgacaaggaacagctattcttatctactgaatgttctttgtgtatagtggtgagtctaacaggtcaccagggttggggcaactttctttctctgatacccatcctgcatatacctacagtgtgtgatgatcaagggaatgattgtcttcaacttcagactgggcgcaatgtggaagacttttaaaaaaaaatccttatatacctacctttgtgggccttttgttgatccatggatttaaatgactgaatggggctaaaatgagacatttgaaatatataagaggccagttactcttgcataactttcctttatgctcccttatcacatctttggctcttattttactcattatcctccttgacatttcaaggagaatgagtatatagtgtacaaatcaacccctagaggaagactaccttattcaaattgtacttcttaattatggagagagaatattattttattttattaacttacctgtcctccaaaggatataatatactaaaaattgcagttgaatattgagtatttaaatattgaatatttaaattgtgggattatttggaaccatggcaaatagggaagtgaacacagttctttctgttaagcaaaatgattctataataccctaagtccctaaatagaatgacatttttttctctttacaaaagatgctgtgattattctaagggaattttttataactatattattttttaacttttctgaaatcccaacaaatggtatgtttccacacaggtaagttagatttatatcatctagtcacattttaaaaggattaagcttttgtgccttacataaattaatcattgtggaatctttggaagacactgtaaatcaagggttaaagcaattctagtaagcattttccttatattttgataaaactcagagctttattttcctttactaatgtgctagtaatttgcagcttcatagtgacgaatactgaattgtaggagtagtagcatcatcagagaatcttacttttgcacaagaaagttagtttgaaaatttgagacttatttagaagttttaaaaatatttttgtctcagcttttaaaaatacatgcctatttatccagcatcttaatacatggtgttttcaaccaagtaaatctgtattcataacagagattaagagatttggctgattttttttttcttggtgaatatgccaacggtctgttttctataagacatgtctgtttcaacttattattttggttatgagtagtttaaacagacatctaaaaatagaatatttgctagagttcttatagaatgatttagagtttataaatagcatgaaagatattactgagaacttgttgatataacatacaaagctaaacagagagaaagaaaaaagatgataatattctaagcatctctaataaggaagtgagtgggtgaaacatcatcaaatgctgatttggttttccttgaaacagtggtaatatctttatatttatctgacttgagttccagcatttacagtatccaattaagtatgctcagcctcccaagttttattactttttatgcgtactgccttgagactcttgacttacctactttgacttataccttttcacattaggagcgtgaacttcctggggggcagttctttaatgtttgaagttgctcagagtttccatctgcttttacttgacttgtggtcttgaagatcatgcttggcccatgggatattacagtgtgccgagaggatgtggagttttgtcagccagtgaaatatgtctggcctttttttccttttttctttttctttctttttttttttttttcagcagctttcatacactcttcatcctgtgtggtcttcactgaaccaaatttatatttaacagaactactcaccctctctatcatcttctgtgacttggcctttttaaggagacgatgtgtggaaggaacgtctgagccaaaaaattgttatcttggcaataggaaaatgtaaaagcaaaagctgaaagtaatgttatatataaatgtgcttcagtattaacaaatacatattttgtaatttaggagaatatcgtattacagtatgtacaactgtcaaaaatattctcgtgccaacagtagattcccaagttttgtctgtgatccaaatgacttttttgcttgttttcaggcactactgcagtcttcagttaagcaacaagtagaagctattgaaaaacagtacatttctgcaattgagaaacaggcacacaagtgtgaggagttgctaaatgctcaggtaataaaagtgcacatccattatatatttatacttttcccctgactctctcccctgagagctctataactgtttattcagttctgttccatttacttggtgtattttggagaaaaaatgtgcttatgtaaactcaaagattgagaattttatgacagactcaaaatagaacgtaagacctgaaatatgtgggtctcccccacattaatgattattcttgtgttaatttatgggttataatatattctccaaataacagaagcaaagagatatctatgaatgcattatggcgagtaaatgatttttagtgagataagatttataaataacatttgaatttttaaagcacctatgtatgtttatgttacctttcattctgtacaggcattggcttctatttgagtttttctattcaaatttttttcttttcttgatttaatatcttagcttaaattattcactgctttacattaaacaaagcagctgaagatttatagatgtgtcatagcataaataatgtatgtaagaatttcctagtaatatttctcaaagatataaaatttggaatgtgaaaattaaattgacttcatatagagcatctgtgttatatcattggaagaaaatttactgagaattaagaaataaaattaggagtagaatttaaatggagattataaatataccaccttattctcaagattggggtcagttctattaagtatttttcaatgtcattttaataagtggcttggaagaggaaatacacagagaaatacacaaatacaattatactgttttaggtagtgaaataccaggctgccagagatatgaaatataaaactttatgaatggatagaaacagcatgaggcatatattagccggaatggacttggttgtgccctaaactctctggcttcaaatagcaaaagtttatattttactcatgctacatactcattgaggtctgtcttggggccctgtctcatgttgtcctcaccctgggaactctactgatattgtaattccgacgtggaacattacctgatacaatttcgaagtgaaagagagccgtgttagatttgtatctgtaattaaatactctggcctggaaatgacacattcgatttcaatttatatccacatggttccacccaatcacaatggggccagagagtgagagcctactatgaacttagaagggagagaactggaaatacttagtgaatagcacaaatataccacattcttttcttttgttcaccaaatagtcaaagtctctatctcacaggcaaattaacctatcttgtcctcctgggagaaaatctaaaagttccattcagccatggcctcaagctcaaaagtccaggaactctgggaaaataggaggggaatagtgtgctgtattctctccattatcaggtccagatgtggtcccttttgacctgaagaagtagaactaaaatctaaattgtttattcccaacatgcctagtatacagtggtgagacaaaggtagggtatttactgtaaacattttcaataggaaaggtgaaaaattagagacacacagctatcattagtatgtaacaactttaaaatctcactggatagattaaataagagcctctgcccacgagtagggattgctctttcatttcccatgattatcttttcagagttttttttgacagcgttcctagtctgttgctctttggggtcttgtaggttttttatttttcagtatctttgtttactatatttcaaatggattttgaagattataccatttctgaacctgcttcctgtctacaaaatattgggagcccaggggtcgttttaagtagcaaatagttacagttaagggtaatgattcctttggtatcttgtcctttatagtagtcagctctgttaaggccgtatccacagttgttttagagaactactttgtatttttttttctttttgaaattttttttttttttactagcctgcctttgtaaagttagagaaccgctttctaaatttaatatgtttatatgctttgaacctcatatttgtctgtctgtctctcctattttattgcagagatatgttcattttatcaaactagggtggaagaaatcttgtctcttttccctaaaccatatagcctaaaacagccatagctttattttatctgtgcttggaggcactttattgagtttttaatagtgagtgtggctaacatacttagtttactacttgctgcaaggccaaatgtagttggtatttgttgctgaaagccttctcagttgtttcttaagtggttgtgcatgcaagtcttcagatttctgtacttttctatttcctgtgatttgatgcttgagaattttcttttttctatgaattcggtgttgagcttgtctttttcttataatgccttctcaaaagtggcctattatggagttattaaaaggattcagccaagttacagattaaaagattaacacatgaaaatcagtgtgtttctacacaccagaaatgacaaattggaaaggaagttaagaaagcagtttcatttacaatagtatctacgtttaaccaaggtgataagaaacttgtattctacaagctacaaaacattgctgaaagaaatttaaaatgacgtaacgaaatggaaagatatcccctgtttgttgattggatatacttggtgaagaacaccccaggacgtttataggattataagcggttcagtatgatgctttttaagtgctacttaaaaagcaaagattagtcgttgcagtggctcacgcctgtaatcccagcactttgggaggccacggcgggccgatcacaaggtcagaagattgagaccatcctggctaacagggtgaaaccccgtctctactaaaaatacaaaaaattagccgggtgtggtggcgggcacctgtagtctcagctactccggaggctaaggcaggagaatggcgtgaacctgggaggtggagcttgcagtgacccgagatcatgccactgcactccagcctgggcgacagagagtctgtctcaaaaaaacaaacaaacaaaaaaaaaacaaagattaaagggagatttgattagtatgtattaataacatcatgtaacatatagaaatggtgactccacatttgtttttcaaattatatttcttaagatgccatttgaaatgaaattagtaccttcagtttaacaacagcagaaatgtctttgagaaaagcgcaaatctaatagctggatggttccttaggaatcatttggttcaaccttttctgtttcttgctctctctctctctctctctccccctttttcagattaagaatttcagttaattctaaagcagaataattagaagcctgcactctagagtcagactatatgaattgatccctggctttgtcacttagggcaagtctcttaatctctctgtgcctcatttttttcctctatggatgagatacacaagtaattactacctcatagtactattatatgtattatatgacatcagatgtgcaatagtgcttagattagagcttgacatattctgggtgtttattggctgcattatctttgtaattcttagctaagactgtttgtatagctagtatcagaaccagggctgggattcaggttttctaatttctagtctttagaagaaaagtttgttactggtatttcatatgttgtcttgtcaaagaacctttactttttacaaaatttactttggtgtcactgttgtatatgaatactagaccaaccttttcttcctctgtactgtttcaacttacacttttgacaccagatgtgtgggagttttctgcatcaacaaccagttctccaactgcctggacaccaaatcggtgttctacaattcaattccattctgacactaactcatcaaagttaacgttcgacttcacaagtttaacagctcagtcccagaagactgacctcacttcagatgccagttgcaagtattaggtccccagggtacccacactttcctctgacttgactacagtgttatgagtttccacaactggtctccccttccagtttgataatttgctagaatggctcacagaactcggggaaacattttactcacgtttcttggtttgtcataaaggatacaactcaggaatggacagatggaagaaatacataggacaagttatggggaaggaaggagcctggtacagagatcctaaaatcttggaattttcagggtgataagagtatctgtggtagcttcgagatcagcatgggggctatcatcagaaaaaccgaggcatgaataaagggttgaaactttcagcctcatccctccagcatccaatggcttaataagttacacctatataatgaaactcctaaatgaaggagttcagaaagcttctgggttgctgaatacatagaagtgctgtgctttatgacactgtacaaagaccagtgtatttcttagtgtatcacagtccctctctcctctttatttaatgagggacttttgtatgacatggcactcggcttggttataggaacgtaacagtgagagagggagtgagacatagttcttctagtaagcagtagaacagatgatataattttaaaatcatataagttaggatggaataaatagtaatacaaaactacattcaagggcataaagttccatagtattaggtgaaggaagacttataggactaatgatgagttctctcaaagttaaggcatctaagtgaggtcagaactgagagattagcatgaaagaagcagatggaattgcatattaaaaatctttcatttgagaaaatataagtgttaagggtaagaccgtatgagggtgctaaatgaaaaatgactatatttcataggaaggatcataaaggaccttacctgccacattgtctgaaagaacattgggtgctattaaaagggattatctagagaagtgacatttgttcagatttgcattttagaaatactactgtggctaaagtataaaaattgatcggagggaatattagtagcatgtaaaatagttaaacagctattttagctacccaaatgagaatgttggtagcccaaactaaagtgtgtgggtaagaatagagagattttgatggttttgagtgatattaagggaagagaaaccggagactttgtgggaatacaagagcagcagtagatgctcattgataaaggagattgtgtgtgtgtgtgtgtgtgtgtgtgtgtgggcatgtgtgtgtgtgtttgtgacacaaacacatatattttatatatataagtatgtttttatgtaatagaatatatttttctgtatggggtccaaatttttggttttggcaattcactgaaataggcaacttaagacacgaagcatggtttgggttgaaaatttttagttttggatatgttgagtttatattgcctgtgcaagatgccagagctgtcagacagttgaatccagggtggagaacttacgagaaagctggtaatagatgaatttgaaagtcatgtaagtatatagtcctaagtatatagatggtcattgaaagtgtatctatggatgagatcagagaatatataaaatgagaaaataattcaactttgagagaccttaacatataagggataggctaagacagctcatgaaggaaactctctggaaagaaagatagtaggaaacccagaaatacagagcattttgcaaagagagagttgctaacattttcaaagtttgcagaataaacaagataaggacacataaatgaccatttcatatggcaacaagaaagtatcactaacaagagtagtttcaacagagtggtggaagaacaaagtagattacaggatgagaagtaaatgaaaggtgaaagtaaagaaacagatgacaagtctttgaggagcttagatgataaaagtaagagacaacactgtaggtagagggacctatgaagtggaaacatttttatttgttggtttcccttgtatttcggcctagaagtagagctcatttaaatgtatgggcgagagccccagtctagaaagattaaaaaaaaaaaattgatggagtggagtcctaagaaggaagcaatgagtggagactaacctgtcttaggtaagcaaatattttgaggggcctatgtgtgtatgcagtggggtatacatgtgtatagatgtaaatataattttaaatactatttgtatctttgattatagcatttatgaattttttttgagttactttccatcactacttataaaatccaaattcctataaaggataagtacaatatgctatttataattccttaagtgctattaatagatatatataaaatgctaccaatacacataagatagagacactatctgtattattatgttgcccttaatcttttattaaaaaagaaaaccaagcctggcttttgcccataatgccttgtcaaaaataaccgatagcaacccacacacattttaaacatattcctgtttattcccttagagttacaagtactttgttgaattgagtgctagaatataaattccatgagagctaggttatatatttattctgtattccccaaatctatcaactttttggagtgagctctacataaaattaaatgtactcattctatagaaatatatacactcatatatctatcatcaacaatcaagatatagaacatttctatcaacacaagaagttctcttatcctttataattaccttccttctataaactctggatcctgacaacccactaatctatagtctgtctattgatttgtttcattttttctgttatttcatatagaatgaattatatggtatctattcttgtatgtctaggtgcttcttgtgtgtctagatttttttgagattcatccatatagtcacatgtattaataatttataccctttgattgctaagtagtattctattgtatggaaacgtagcattttgtttattcattcacttattaaatatttagattgcttaaatttggggctgctttaaatgtttgcatataaactgtgtggggatatatatgtttttatttttgtttgtaaatatctaggtaaggaattgctgtgtcatatggtaagtatatgtttaactttaaaaccaactgccaaaattttttccaaagttttattatatttgacattctcactatcaatgtatgagaattctctttgatctgctctctcagcacttggtattgtccatctttttcactttagccagctttgggggaatggggtgtggtatttcatctcattgcacttatttggctgttgaaggttaacatcttttcatgtgctttttatttgtacattttctttgtaaagtgtatattcaaatctttttgcttattttattatgttgtctactttcgtaaatattcatgagtttttcataaattccagatacaaatcctttgacagatatgtgcactacaaatattttttcatagtttctgtcttccttttcactttttggatggtatcattagacaaacaaagctttttaatttttatttcaaatttatcattgttattagtcagctctcacactactatgaagaaatacccaagattgggtaatttataaagaaaagagatttaactgacagttctgcatggctggggaggtttattagtctgttttcaccctgctaataaagacattcctgagtctgggtaatttataaatgaaagaggtttaattgactcacatttcaggaaacttacaatcatagcagaaggggaagcaaacatgtccttcttcacatgacagcagcaaggagaaataccgagcaaagggggaaaagcccctttaaaaccatcagatcttgtgagaactcaactatcatgagaacagcatgagggtaactgccaccatgatttcctcccactgggtttctcctgcaacacttggggattatgggaaccaaaattcaagatgagatttgggtagagacacagccaaaccatatcatttcaccctgaccactcccaaatctcttgacttcacatttcaaaacccaatcatgcccttctaacagtcctgcaaagtcataactcattccagcattaactcaagagtccaagtccaaagcctcatttgagacaaggcagatcccttctgcctatgagcctgtagaatcaaaagcaagttagttacttcctagatacaatggagatacagacattggatagatgcacttattccaaatgggagaaattggcaaaaataaaggggctacaggccccatgcaagccagaaatccaatagggcagtcattaaaccttaaaattccataatgatctttgactccatgtctcacatccagctcacactgatgcaaaaggtgggctccaaaggccttgggaagctctactcctatggctttgcagggtacaggcctcctcctggctgctttcatgggcaggcattgagtgtggcttttccaggcgcacagtgtaagctgttggtggaactactattttggggcctggaggatggtagccctcttctcacagttctactaggcagtacctcagaggggactgtgtgtgggggctctgaccccacagtttccttcctcactgccctagcagaggttctccatcatgggtccacccctgcagcaaacttctctgcctggacatccaggcatttccatacatcctctgaaatctaggtggaagttcccaaacctcgattcttgatttctgtgcacctgcatgctcaataccacatgccaaggcttggggcttgcaccttctgaagcaatagcatgagctgtacgttggccccttttagtcatggctggagctgaagcagctgggatgcagggcaccatgtcctgaggtctctccacacccccacccccacccccaccctaggactggcccaggaaactatttttcccccctaggcctccaggtctgtgatgagagggactgctgtgaagacctctgacatgccctggagatattttccccattgtcttggcaagtaacatttggctccttgttacttatgcaaatttctgctgcaggcttgaatttctccttagaaaatgggtttttcttttctgtcacattgtcagactgcaaattttcccaacttttatgctctacttcccttttaaacataagtttcaattccaaaccatatctttgtgaatatataaaactgaatgcttttaacagcacccaagtcaccacttgaatgctttgctgcttagaaatttcttccactagatatgctaaatcatctctctcaaattcaaagttccacaaatctctagggcagggacaaaatgccgccagtctctttgcatagcaagagtgacctttgccccagttcccaacaagttcatcatctccatctgagaccaccttagcctggacttattgtccatatcactatcagcattttggtcaaagccattaagtaagtctctcagaagttccaaactttcccacatcttcctggctcctgagtcctctaagcctttaggaagttccaaactttcccacattttcctatcttcctctgagctctccaaatggttccaatctctgcctgttactcagttccaaagtcacttccacattttcgggtatctttacagcagtacccactctctgtggtaccaatttacagtattagttcgtttcatgctgctaatacagacatacccaagactgggtaatttataaaggaaagaggtttaattgactcacagttcagcacgattgcggaggcctcaggaaactaacaatcatggtggaaggggaaacaaacatgtccttcctcacatgacagcaacaaggagaagtgccaagaaaaagtgggaaaagccccttataaaaccatcagttctaatgagaactccctatcacaagaacagtataaggataactgcccccatgattaaattacctcccataaggtacctcccacgacatgtggggattatgggaactacaattcaagataagatttgggtggggacaccatatcaggaggcctcaggaaacttaaaatcatggcagaggagctgcttcacagggcaacaggaaagagaataagtgctgagggaagagggaagcctcttataaaaccatcagatctggtgagaactcactatcaggagaacagcatgggggaaattgcccccatgattcagttatctccacctggtcctgcctttgacacacagggcttattacaattcaagatgagatttggtgaggacacagagccaaactatatcaatcatgttttctattatagattgtgtttttaatgttgtatgtaagaaatctttgcctaaccatatgtcacaaagattttttcttgtatcaaaagaagttttgtatgttttcctaggttaagtttgtgattcttaattatgattaatttttgaggtaatttggagatacagtgtgatgagacagtcaacgttcttctctctgccagtctattccaataccatttatagaaaagactatcgattacccccatacctttggagaaagtcttacaactatatgaaatgcagatttctggactctgaattttgttccattgatctagtatttctcagcattggcattattgacattaggggttgaatttttttgtgttgtgggggattcccctgtgcgttacatgatacttaacagcatccgtcacgtctacccctagatgccatggcacacgctcagttgtgataaccagaaatatcgctagatattgctgacactttgacaatattgagttttcttatctatgaacgttgactgtctttatttttgaatagttctttgatttctttcatcagagttttgtagttttcctcttatagatcttgtacatattttgttagatttaaagctaaatgtttcaattagaaggatgctaaatgttaatgtgttttaaatttcatcttccacttgttcactgtgatatataagaaagtatttgacttttttgtatattatccttgtattctacaagtttgctgaatcacttattagttccaggaattttttttttttttttttttttgtgctactctttggattttctacacagacaatcatgtcatctgcaaaaaaaaaaaaaaaattatttctttcttctcaatccatataccttttatttcctttttttgtattactgcattagctaggatttcagtgcaatgttgaaaagcagttgcgagaaagggaatacttgccttattcctgattttattggaaaagcttctagtttttcaccattaaatatgatcttggctgtagaatttttattgttattctttatcaagttgaggaagttctcttctactcctagtttgctgagagtttttaatcatgaacgtgtgttggatttttgtaaagtgctttgaccattttattgatatgattatgctatttttctttagcttgttgatatggtgggttacattaaatgatttttaaaagttgaaccagatttgcataccttggcataaatgccacatcgttgtcatgtatgattcttttgctatgctgctggattcaatttgttaatattaaggatttttggtgtctcacaaaatgtttatgattattgatctatagttttcttttcctgtgatgtatttgtctggttttgacattagggtaatgctggctttatggaatgaatcaggaagtattctctctgtttctatcttctggaagagattgtacagtattgttataattatttaattagatgttttgttggaattcaccagcaaagttatctgggccaggtgctttctgtttggaaggttgttgtcttagcctctttggggtgctgtaacaaaatactataaactggtggcttgtaaacaatagaaatttacttcttacagttctagagactaagaagtccaagatcaaggtacctgcagatttggtgtctgttgagggcctgctttctagatggctgtctttttactctaatttcatgtggcagaagagataagggatgtctctggggtcttatcccttctaccatgaccccatatctctggggtctctttaataagggtactaatcacctaactttcatgacttaatacttcccaaatgccccccctcctaataccatgaacttggtggctaggatttcaacatatgaatttggagacacaaacattccaactatagcagttattaattattgatttaatgtatttaatagatataggcctactcagattgtctgtttcttcttgtgtgtttcagcaaataatcttttaaagacttggtccatttaatggaagttatcaaatttgtaggcatacagttgtccgtagtattcttttatttttcttttaatgttcatgggatctgtagtgatatcccttatttcatttctgacattagtaatttgtgttcatttcttcttttttcttggctagtctgctagagccttatcagtttttactgatcttttcaaacaaccagcttttggttttattgatttttccatttcttgtttttaatttcattgatttctgcttctcttatttttagtatttttatgttattttagatttaatttactcttgtttacttatttccaaaggtggaaacttagattgttaattttagatctttcttctcttctaatacatgaattcaatattttaaattttcctctaagcacctctttcggtgtgtctataaattttgataagttgtgttttattaaaaatattttcaatatcttttgagatttttcttgttgtttagtaatgtgttatttaatctgtaaatattgttggattttctagctattctcctattattgattttctagtttaattccaccgtggtctgaaagcagaccacattttgtgatttctactcttttaaatttcttgagttttgttttatggtcccgaatttggtctatgttagaaaatgttacatgtgagtttgaaaagaatgcatattctgctattgctggttgcagtatatagacttcctttatattgagttgatcttggtgttgttgagttcagctacatcctttctgattttttgcctgctagatctatttctgagaagtgggggcaattgaagtctccaactttaataatgaattattttatttttccttgcagttttgtaagtgtttgcctcatgcattttgctgctctgttattagggacatacatactaagtattgccatgttttcttggagaatcaacacttttattattatataatgcccttctttatccttaataactttctttgctctgaagtcttctgaaattaatatagctacatgtgtttcttttcatcagtgttaccataatacctctgtctttatccacttacttttaatataaatgtgtctttatattcaaagtggatttctcatagacagcatactggagggtcttgttttttgctctattatatttctgtcttttaattggtgtttttagaccattgacatttacaatagaccattgacatttacaatgattattgatagagttggattcatttccaccatatttgttattcttttctatttgttgctcttttttttggtttctatttttgtctttcatactttttctaccttttctggttcaaattgaaaattttatgatttaattttctctcctgtcttagcctattagttataattttttttcttactttttaagtggttgccctaaagttcacactatacatttactagtaacccatattcattttcaaatgatgttatgccatttcacaggtactgtgagtaccttacaatactaaagtattccaagtttttttatcctggtgcttatatcattgatgtcattcattttacttacacagaagtatacatactcatatatattgttgctattgttattttaaagaaaccattatatgttgcatcagttaagaaaaagaaaaagttttaattcacttattccttctcagatgctttttccatgtttatgtagtttcaagcgtctgacctatataacttttcttttctctaaagctctactttttctttggccagatcaaaaatgtttctttttattctggtgaacacaagatgatacataaattagcctcagcttaaaggtactcactgaaatttgaaaatgctgaataattctcttcaaagcatccatccctttcagggcttctatttttcaacatgtgacatcagaataaagttctgtattttggttttgttggctggaaaagtgacttctttggtagtggtagaaaagccaaggtttgtgacttgaaggcagattgtgatgctataagcaaattttggattttttgaatactttttgtcctatatatttagataacagatatgagatatgtagataaataaacatatgcaagcacatatagttataatgtctatgtaatgtccattcagtagtatgttttgtaaaaaaaatctgcaaaataagagtatgtcagcagtaactaccctatgcatcccccttacgaatggtgaatccaatcaggtaattagctcattccaggtgattcccatcagccagctagctcagcccaggtgacattattttttcctcaatttttaagttccagggtacatgtgcaggatgtgcaggtttgttacataggtaagcgtgtgcatggtgatggtttgctgcacagatcaacccatcacctaggtattaagcccagcatccattagctattcttcatggtggaaatctctacttttaacatttcttgcgagcctgttcttccaataaaaaaaaaaaaaaaatccctcaatttttgagaaagtcgttattagtgtacaagtctttgtatggactcatgcttttatttttcttggataagttattagcagtagagacctagctaggtcgtatgatcaaatacctagctaggttgtatggtaaagtatatgtaaaatgtgttttcacaattttgctcatttgttgttttcttatgattgagttatgagagttcttgatatattctagatataaacccttcatcagtatgtgatttgcaattgtttttatcacagtctgtggcttgtctttttattttcctgatatgtttctaagagcagaagttttaaggttatatgaaatccaactcatcaatttttcttctgtggttataatttgggtgtcttatccaagaaaccattgcctaactcaatatcaaaagaggtttttcctatgttctattaaagttttatagttttaattcatagtttatgaatcattcattttgagttgatttttatatatggtatcagattttaactatttttttttgaatatcaatacccaactcttccagtcttatttgctgaaaagcctattcttttaccagtggatttcttttgtacatgacatggtttggatctttgtgcccacacaaatctcatgttgaatttaaattcccagtgttggagttggggcctggtgggaagtcattgaatcatggaggcagttttctcatgaatgatttagtaccatccccttggttctatcctcatgacagtaagttctcccaagaagtgattgtttaaacgtgtgccacctcccaccccgtgtcttgctcctgcttttacgatgtgatgtgcttgctccccctttgcttttcaacatgattggaagcttcctgaggcctactccccaaaaggagatgcttctgtgttttctgtacagcctgaagaacagcgagcccattaaaccacttttcttatacattatctagtctcgggtatttctttatagcaatgcaagaatggaataatacagtacgtttgtcaaaaatcaatcgaccatatatatgtggatctatcacttgattctctattctctttcatgtatctatttgtcaaactttactccattatgatactgctttatttagcatggatatttagtcagttttgaaatcaagtactgtaagccctccattatttttattttgcaaagttgttttggatattttaggttctttgcatttccacataacttttataatccagtattgtttttattttacaaagttgttttggatattttaggttctttccatttccatgtaacttttataatccaccaagcaatttctacaacaaggcctgttggtatgttgattttggttgagttgaataaatttagggagaactgacattttcacaatattgagtctttgtacctatgaaccaggtacattgctccatttatttaggtcttccttaatttccctcagcagtgttctaagttttcaatattcaggtttactacatcttttgctagatttatctctgactagttcatatttttcaatgttagtttaacttttatagtttttagttttcaatttcaattatctcatgcttgctgctaggacataaggacacaattggtcttaaccatatacatagatatatatatatatatatattttttttattttttattttactttaagttctgggatacatgtgcagaacgtgcaggtttgttgcataggtatacatgtgccatggtggtttgctgtacctatcaacccgtcatctaagttttaagcctcacatgcattaggtatttgtcctaatgctctccttccccttgtcccccaacccccagtaggccctggtgtgtgacgtttccctcccagtgtccatgtgttctcattgttcaactcccatttatgggtgagaacatgtggtgtttggttttctgttcctgtgttagtttgctgagaatgatggcttccagcttcatccatgtccctgcaaaggacatgaactcatttgtttttacggctgcatagtattccatagtatatatgtgtcacattttctttatccagtctatcaatgatggacatttgggtttgttccaagtctttgctattgtaaatagtgctgcaataaacatacttgtgcatgcgtctgactttttaataatagccattctgactggcgttgagatggtatctcattgtggttttgatttgcatttctctaatgaccagggatgatgagctttgtttcatatatttgttgcccacataaatgtcttcttttgagaagtgtctgtccatatactttgctcactttttgatggtttatttttttatttttttatttttttgaggcagagtcttgctctgtatcccaggctggagtgcagtggcatgatcttggctcactgcaacctctgcctcctgggttcatgcaattctcttgcctcagcttcccaagtatctgggattacaggtgtgcaccacaatgcctggctaatttttgtgtttttatcagagacagggtttcaccatgttggccaggctgctctcgaactcctgacctcaagtgatccacccacctctgcctcccaaagtgctgggattacaggggtgagtcaccatgcctgactttaatcttatattctgtaattatctaaaattgttagttttagcagcattttttgtagggtttatagaattttctacatagatatgttttctaagtataaaaggatgttgttgcatcttcctttttaatcttgataccttttatttctttttcttattgcacttgccaaacttctaatacaatgtttaaatagaaagatgagaagcaaatatttttgccttttgcttgatcataagaagaaagcattaatttttccattattttagctgtacctgtttttgtcaaagcccctttattaagctgagtatttttctttctattcctagtttttattccaggaaaaaatgttgcattttgttgaacaaatgtatatacctgtttatctttgtgttaagtataagtgtgtgcatgtttttcatatattcccttatccttttaaaatatctataaactttggtgattatctcttgtcttagtctagataattgtaatctatgttttctttctttttgctgattagtttattagagatttatcaattcttttttcttaaccttctcaaataccagcgtttggtttcattgatttttaagtttctatgtcactgatttcttctgaaacctttattatttaatttacgtaacttaattggctttcaatttgcatttattctagtgttttaaaataggggcttaggtcttgcattgaggcttttcttctaaaatgtagatatttaatgatatatatgtccttctaagtactactttaggtgcatttttcacattttcaaaggtcatgttttcattttcaattcaaaatacttttaaatttatcttttgattttttttaaccactaggttatttagaagagtttttatttagtttctaaatatgtcggtgtttttcagatgtatttcttttttttatatttctaatctcattctggttttgatagataacatacttatgtggtttgaatacattttgaggtttcttttatggcctagactatagtctgtctttgtaagcatcccttgtctacttgaaaaggttgtacattctggtgttggtggaattttgtataaatatcatttaggtcaaattttttggtgtcttgtcaagtcttgtgtattgttactaatttcctgtgtacttgttctgctagtcattgagaggcaagtgttgaaatctctgaccgtacttttggatatgactagttctccttgctgctctgattattttttgagtagttttgacacacttatatttagtgtattcacatttaggattatgatgtcttctttatatatttgtccctttattactatgaaatgctcatctctttctctagtaatattatttcctatgaaatctactctgtatgatattaatataagttctccacatttattttgattattgttagtatgatgtattatcccctattcttgtacttttaatatattggtttatgtttcaaatgggttttcttgtaggaagcatattattgcatcttgttttttatccagtccaacaatcagtagcttttaattgtgtgtatgtgttttttgtttgtttgtttgtttgtttgtttttttgagacagagtctggctctgtcagccaggctggagtgcagtggcatgatctcggctcactgcaacgtctgtctcttgggctcaagcagttctcctgcctcagcctcctgagtagctgggactataggtgtgtgcccccatgcctggctaatttttgtatttttagtagagacagggtttcactatgttggccgggctggtctcaaactcctgacctcaggtaatccgcccgcctcagcctcccaaagtgctgggattacaggcatgagccaccacacccagccttaattgtgtttttaaaaccctttaaatttaatgtgattattgacgttttttcattttaaatgtatctcctcattctttgttttctgtctgttccttgtgttcattattccctcatgtttttttgcttccttttaaattggatattttaatggtatcattttaggtctcctttgttggcttatcatctatatgtctttgttatttttgtggttgctttaaagggaggttaaataattaaatgaaggacagttcctactgtgtggtaatgcataacaactaaaagctatagttatgatggcaaatttcttaattagttccactgtggttacttttacactgaggatgtccattcttctgaaatacaagaaatagttcactcagacattgttacagattttttaaggttttctttttgaaaaaaaaaagtatgttttaaaattttactgctcttaccattagcatttagcagttttgtgtttttaaaacatatgatttcctttgaaatatggaaaatttcttccccatttgattttggaagtttctatatcacatattttaattagaatatttgtaattaaattgaacaaacacaaaaatgatcttatagacggtgtcaagatttaacagatgattttattgtgagatatatgctccagatctattatgtttagaggaaaaagttacaaatagagctaactcttgacttctttgtcatatttcactttctcttccttccctaaagcaccagctttatacagaatttactatgtttttactctttccttcctgtacccataattgtttagtatagtcatccactgaataatgatgttttggtgaacgatggactgtatataagatggtggtcttataagattataatagaaaagaaattttcctatcacctagtgacattgtataaatgtcataaatgtcacagtgcagtacattactcatgaaaatctaaaatgaaaaaagaaaccaagcaaaccaccatggaatatttctgaaaagagtgacacctcaagaaaaagcctcaggcaggtccttcaggaggtatttcagaagaaggcatcacaccattcatgagggatccactccgataacccagacacctctcactaggccctaccccccaacaccaccacattggagatcacatttcaacatgagttttggtagggacaaacaaacatggcaaatatgtttagatgcacaaatagttactattgtattacagttgcccagtgtatttagtatggtaacatgctgtacatgtttgtagcctaggagcaatagattacaccatacattctaggtgtatagtaggctatatcatctaggtttgtgtaagtacactctatgatgttcacacaatgatgaaattgcctaatatcacatttctctgaatgtgttcctgtcattaagtgatgcatgaatgtattgagttctttgttattcttaaattcttccaaatattattattgttacttatatttaatcatgtgggagaccagatcatgctaccccaaaatatgaagaattgttgagttgaaggcagttaagaagaagcagatacaggaaagctctctgcctaaaagtaggacatagatttagaaaggcaaggtatcctgccatcatctcttccccatctttcactcaccattctgtgtctggagttggttcctgctggtgggatcgtggtcttgctgacttcaagaatggagctgcggaccttcacggtgagtgttacagctcttgaagatggcacggacccaaagagtgagaggtagcagggcttattttgaagaatgaaaggacaaagcttccagagcatggaaggggacctgagcaggttgctgctgctggctggggtggtcagcttttatccccttattgtcccctcccatgttccatttctgtcctttcagagtgcccttttttcaatccttcctgcgattggctgcttttagaatcctgctgattggtgcgttttacagagtgctgattggtgtattttacaatcctcttgtaagacaggaaagttccccaactccctactcgacccaggaagtccagctggcctcacctctcaattccaccaggaagaataaaggttagtcactgaagataactttaaatcctttttggcctggagatggtaccagtggaatctatattaataggctttactaactggcttttatctgccatttatttgtctcacaaattgctgcctctagagactcaaaaaagtccttttccattgttttctcatttctccaaaaatcgactgttctttgttaaagatactatataagctagaactcagaaccacctcttgagaactactcattccctgggcatctcccatatatatatgaaatatacatgttaataaacttacatttttctcctattaaacatttttttggtataggggtcctttccaactaagagcctgttgaagcagaagaaaatattctttccccacagttcttaatggatttttacccccatattttaaatgttcctagctgcttcttgcctcttctccctcctcatgtgtttaatttctttcctaaattatagtctttattaattgtaaagtgtaaacttaactaatatttgtttttgtctgaacatttttgatgttttttaggtaatttatcttttctctttggttgtttttaatagttttacttattcttgatgtgctgtaattttactcagatgatcttatcatttatttttgaatttattttgtatacatcctgctgaggcgtgacagtgataacaaactgcgcacctaaatttgttcttcctctttcttagtatagcgttgtcactggcaagttgctcctcccacagggaaccttttccattgcttctgttgggtgattgcagttcataaaagcatgcttttacctttatgctcccatgaaataatctttcaaataaaacaattgacatgaaataatacttttcaaattcaatagtttaacttttaattttcctggacagtaaacaaggttcaggttgcttagtgtttaccaatgatttgtgagtgcaagaaatatgtttcactttctgatgaatacggtacatgtcctttctctacgatctctttccctttttgcctgttagataacacattaagatgtttgtcaatggcagaaccacgagtgaaaggaaattgggtctgtgatttaccacttggagggaatctcctcattcaggaacatttccaagaaagaaacttatgtgtgttaatttactaaaattttggggtttatttgttgatggtagctacctttaatacatcaaaactcgtttgtctttgtctttctaaaatttttatactgttagatatatattttttacagcccaaaatttatgacagaaatatatacctctagaaatgtgtaacaacatttaaaaagttgagaaatattgtaataataaatgattatagacaacaagtcagatagtttggatgccaagcaagtaaaaaaaattcttattttgtctgtgtgtaggggaaggaagaaggtgaaagttgcttttagcttgaaagtagatatagattactatttaaatattaatatatgagaatattcaaaaatataattgaaatgttcaaaaagtaccccaacatttaaggaattattataatttaaacattttatttttgaatgtgcatactttatgtctaggtttaattaagattaaggaatgggtgctttatgcctggtctcctgtgtgtcacatgattcttttctgtatggcacaggcatttgatcacacttggctattcatttgagtatcagtcattacatttccagatcatggtaatgttttaaaatattccttttattcatttagaggaaaattggtaatgatatattgttacaagacacccactcattctgcttgggaagaacagaaaaatattgtggtcttggcaccttaaacagagaaaagaaacatagagcaatgaacttggggcaataaagtagaagtaaaacaaatgacatattaagtcatacacaaatgagatactccataggtgaatgccttagaaacaatgaaaaaacccgttcctcttgtttaatgcattaacactttcatcatattgaaaattaaactctttctttctttgggaaggcactttttcttactggtcaaataatatagaaaacacttatgcggagatacctctagggttttaaatataattagctaacattttggtaatattatgggctaaggtattcaagttattttgttttctagagtgctttaaggtttatctatttttaatttttttctactttcctttaaggctcttctctttaggtaaattttagaaaccatgtgaaatgttatttgtttgtaaagcggatttttttttttttgagatggagttttgctgttgttgcccaggctggagtgcaatagcacgatctcggctcactgcaacctccacctcccaggttcaagcaattctcctgcctcagcctcccgagtagctgggattataggcatgcaccaccgtgcccggctaattttttatttttagtagagacggggtttctccatgttgagactggtctcgaactcctgacctcaggtgatccgcctgcctcagcctcccaaagtgctgggattacaggcgtgagccactgtgcccggctgtaaagcggattttaaaatgagtagttaaaagcaagtcttgttactgaggatatatccatgaaaaaaataattataaaaacatggaaatttttttgtaatattgatttgcatatagcctttatttaactaataaagatatatatttgtgtgtgtgtgtgtgtgtgtgtgtgtacatttacttttcactacagaaaaaaatattttgagtcaaaatttgcctccctacctgaaaatattcttgtgaacttatatagtggttacagtcaatataggagacatgattttaaaaactaagaataaagtggaaaaaaggcaatgttgacattattttctggagtttcagcatattttgcaaattaagtctggttttgttcttgatatcattcagtaccaaagctattcaaatgtaattgtcaggctgtgtcctgaatattcagcactgaggaatgtgttttttttttcttttttcttggaaatccagtcatgaggtaatttatcatgaaggaggaatggctcttagcgttttttgttatatttagatgaggagtcagcacctagacagcactcctcacccagctgcttcttggagtttccaaaaatctaacacaggaaaaagggtactaatgtctttatatctaataagcttcttattaacttttatgtttttatagcattatttttgtcagtaagtgttatatccccacaactattatcattgttgttgctgcactagcttagcatttatattaaataggtagagactatttctggaattgtacttttcttaaaccaattctgtcttacccaaaagcttctggtgtgtatcaaagggtatagatattgtatggtgtgtactgttagagaaaaaaaaactattctgacacttttttaaatgataaggaagactttattcaagactactgcaatagaagaaagaaattaggctcaaccctgaatacagtaagaacaagaggggatgtatcggcaaggacaggtgggagtgggtgggtggatggaaaattactgaaaggatacatcaaggatagggggaattgttgctaaactgacctaacaggagggcaggctaggatgatcagatggtgaagatcgggagaagaatttgatgagatatcaagaaagggggattttgtccaaacctactactaagttagattcttgctgaaggtgggttaagcatttctggcaagatcaggagccagggtcaaggcctagtcaaaaacagagcttagaagagtctgactgaagattttggtcaagcagagtatcttgtcagtactcagacacagacaactatagcaatggttatacacacacacttatcatatgtagtattatgtatatgaatatatatatatgattatggacataaatatatgaattgaccacttcctattggccttgacctttcaatttagttatgttgctttgatggtctctggtttcatctttttctgtgtatgtatatggatctcttgagcctctctaccactcctcctctttctagcatttgctgtgtctgtgatgttcagtccattgaataatggcagtaggaacctgtatgaacttctagattttgggcctgaaatttaggatatttgcttttacacagttctttacattcaaaatgtgtggttattgggtttccttttttattaatttttaatttttttgcttatcttatttgtgatgttggctttcatttattttttcatttaaaaagctatactttgcatgcagtaacatttgtcattttgaaagtacagtcctgtaaattttgacaaacacaatcatgcagctactaccataatcagaatataaaacaattctgttaccccaaaagatttcctcgtgctctttgtaaccagtcttattccccatccctgatacttggcagtgatctgttttaggtctcaatagtttttatttttcaatagtgttatatgcttggaatcaaatagtatgttaccttttttgttttagtatttttcttttgtctttttatttttccccagctttattgaggcataaatgtatatattaaaattgtgtgtatttaagctgtacaacgtgaacctttgagatatatatatatatatatatatacacacacacacacattgttaaatgattaccacagtcaaactaattattaataacgtatccatcacatcacaatgttatttttttatgtgtgtggtgaaaacatttaagatctacccttttagcaagtttcaaccatgcaatactggattaactatggtcccaatgccgtacattaagtatgttgccttttgagtctggtttctgttatttagtataatacatttccagtgcacctatgttgtatatttattcatagtttttccttccattactgagtggtcctacattgagtggtaaatgtgttatattttatccatttagcaattgaaggaaattcaggttgttttcagttcttggcaattatgaataaatctgcaataaaacatacatgtgcagcttttggaatacatatgttttccttttctgggttaaatacttaggagtagcactggtggatcatttggttagtgcatgtttaatttgataaagtgtcagactattttccaatgtggctgtaccattttgcattctcacaagcaatgtatgtgtgttcaggttcctttggattctcagcagctcttggcattgtctgttttaagccattctaatagcttaccaaaatttatgaaaaatttaccaaaaacgtaatttgtagtagaaactgacaacaattgctaaagctagataaaaatttaaaaatgaaataaaacattcatcaataaactgagacaaaaaactgttttaattattctaagatggaaggtagtattatatagttgtctgaagcacagtaaggtaaaattcaaactgtacaacttttagctattgactttgcctgaatttccttatctcttcaaagaccatctactcaaaattattttcctttaatgagatataatgtgccttaattgggatataatctcaaagcatagtgctgtcctttagaaaaagctgaatagtagctattgaaattattattatgttaatggcagattaatactgtaaaatagatttcaaagtttttaagatgtgatatttcaaaattagattaaactactggattcttagaatgaaagaaaggatcgggccaaaaaggtcttattttcttcttccttaaattaaataaaaagttttggttgttattatatgcagccacatttagataagcgtgacattcaaaatgtttgttgagagctttattctggccattatgaaatttaaagttgaatatctaccatcaaaataattacacaagataaaggcaagtcaaacaaactccaacagttaaaagtaaaaataaggccattaattataatgtttaatgaggactaatcatgttctaggtatttgtcaaaatgcttatgtacattattttatacatccatccattcattcactctttttttgtcagatattctacgggaaaaacaagcatttttttacatatgttttataccaaaccctggaggggtcctagggatataacagtgaaaaagtctgtgccagtaaaagcctgcaacccagtgtggaaagccaaactctagtactaggccattacaataaaataagagtaattagtaagaaaaggataagcccagaatgctgtagaaatcttcacaagaccatttaatctcactttattctaccacatctgtgtagaaacaacactggagtcaggccaactagtaaaactatcataactatcatgacggtaaatataagtggtcttattttcttttgcagtacaaaaattttatatcagattggatttaaaagcaaaattcaatcattacttataagagtcataaaaaatgacacaagaaaaatataaaccaataaatctttttttgtcaatctaatttcaataaaaagtaagcagatgtagcagtattagcaaaatggctacttttgtctaagtagaatattggacaaaatttattgacagacgttttgtaagtctacttttactgatattggtcaatcagtaatagaggataaccacctggagacatttacttattaatcaaaataattagtgtcatcaatgcaacatttactatgtgccaagtaatacagttggtctctttcatgtgctgttttttttaaattatcatttttttttttttgttctttgagataggatctcactccatcgcccatgctggagtacatttgtgtgatcatggctcaccatagccttaacctgcttggctcaagctatcctaacacctaagccttttgagtagctgggactacaggcacatggcaccacacctggctaatttttgtgttttttgtagctatgggttcctactgtgtctcccaggctgatctcgaactcctaggctcaagtaatactcctgccttggccttccaaagtgctgggattaaaggtgtgagtcaccatgtctggcctaaaaatttctttggaaaaccactgtaagatagatagtagaggtgataatcagttattcagtaaaatttaggaagctgacccatatcacataaccagtaactaataggtaacaaaatttggatttgattccagatctaacttcaaaacttaaagcaaaaaaatcacaaatcataacaatgcattctgttatgtagaaaatttgatacattcaaagctctagatgaaatttttctatggcttgaaactcttctagacaggtttagattaaatggatatgttttagcactgttattagctggactttgatgttcacatagctctaaatgaaatagaaatgtgaataattcttttatttaaaatatttttgtgttatttttcctactttaaaagtctgataatcattagaggaattgttatatgccatctgtatgtatcagacactactgagtgctagctgattgacagcacataagacacagtccttaccctcaaggtttgtttgtttacctcagtgtttacatgacccatggaaaatgaaaggtaaaggaagaagaagaagaaaagcaaacccagagtctcaccacttaagcgttgttattgtatttcccacctatttgttccttttcccatacttgcaattatagattatatgacatcttcctgttttcacttaacagtgttgcaggtgtgcattttatggttttttttttttcagtagcttgaaaactcactgagggcagtgatatttcattaaatatttctttattttcaatatctgacatttagaatccgcaaaatttttgaattcacaaatgttttttgagttcttaaataactttttactggtggctttctattgtcagaacttagtttattcatgtatttttccagtatacagaatgttgctatgagtaattatatccatgtgttactttcctttttttgcaattttttctcagcatagatttctagcagtggaattactatatgcaaggaccttttttctcttcatcttattgttcatgttattgttaacattttaagacattttagcatatactgtgaaaattctttgtataccaatttataaatcacaaacaatacaagaagatgatcatggacttagcttttaccaacatttaaaaaactatgttttaaaacttattttaggttcagggatacatgtgcaggtttgttatataggtaagttgtgtgtcgtggggatttggtatatagattattttgcacccaggtaataagcctagtacccagtagatagtttttagatcctctccctcttcccaccctccaccctcaggtaggccctggtgtctattgttcccttctttttgtccatgtattctcagtgtttagctcccacttagaagtgagggcatgtagtatttggttttcagtccctagttagattgcttaggaaaatgacctccggctccatccatgctgcagcaaaggatgtgatctctttctttttttttttttatgtctttcttttttatggctgcatagtattccatggtgtatatgtctgtcactgatgggcatttaggttgatgaatccagtttgtcattgatgggcatttaggatgattccaacagtttcctgaagaagaagaaattcctcctcaacactgtaacatagaaattctgcctgtgtttacagtctgcctgtttcccttaaggattttgtacttgctagcccccacaagcctgggagcctgttccataaaatcagccaatctcccccttttcctttatccttcttcctattccttccctgtatcctatcatttctgttcctctggggaaccctggcggatacactttgtaaatttgtctttatttgctgatccttgagattgacatcactttgtaaggagtcttgagtacttgttgtgcttttctaatttgcctatacatactttgtgctacttgtctcctggagtcttgtttcactattaatgtataatagtctttgaaacggtggaaacctgtacttgcatcaatcactctatcactttaggatttgccaaatgctttaatgtaaatcattgatttatttatacatttagacggatattgaggaattctggttgttgtctttaacatagtatccaaaagtaccaaaatcaatcacatcaaaatagagtttggctttcttatacaattcaagtggaatttatccaattatatttaattcaatacttttttggtaattgccttttcatactaatatttatatgggttataggaggtaaaagggtacttatcaaaatataaattttatagtaattaatggcatttaatactatttttatcttcttaattttgtatacagtggttataaaaataatactaattttattacttttggtgttattattctaatccattctaagcataccatcaggatcacttgagtctcattctcataaaataagccgaaaaagtgtgccttgagaccctttatttgccaggaaaaacacattttattaactgctaattattgtcccaaatgtatatagttatatgttagcagattgtggctagccataaaattgtttttctcttaccacatgcttcacttttctttattctccacatacagtgaatttaagagttattacaaagtgacattttaaactgaaatctgttacaaaataagaagtttgttttctctttctctttaatgtattctttgagagagtaggaaaatcatcatcctcactttaaaagtatatgttcacattacgaaaaccagggaaagaatcgtcctactcattggttgggaaaaatttgtaatagtgagaactaaattagaacttcttaactcctgtttaatactttttctctaattccaaggttgttgttgttggtgtttgttgttgttggtggttgttgttgttattgtttggcttattaatctccctcaatacaaagataacttctttctgacagaggaaattattaaaagaaaacagaaactctagagtagtgaaaatacaacagttgtgcaccaagctgatgccctgtccaggagaattgtgaccaagggacatgcaaaataaaaaaatgaaacatttcctgtgatcttctgaggcatttaaaaataatgctctaagtaccctagactacaaatagagaaaaattcttaactttcaaaaagaatatttatattttgcaaactgttgattgtcaggctaaacttaacttttgaggagatttgctaggctagtcagtcaggaaaatggggaaggactttaatatctaaatattagtaagtttcttatgcagtcctagtgaacaaaagtatgaaatatacgggggacaaaggcattagagaaataattggccacaccacatatatcaatgtatggattgatatccacttggaggataggactatggtagaatgtcaaggggtactatctgtatctttattctgctcaacatttattgctatgaaaatattgaagcatattttcacatttgtatatgacataaggtcatatttaaagtattttaaaacgctggaatagtggggctgaattcaaagtgaaattcaaaaggaataaatactatgatcttacagtaaaaacttctgcatcaggagaggatttggaggagccaaactcagccatacaacatgtatttaatattttttaacagtgagttttcaaagaaaattttaaaaactaatgtaatttaattgtgtgtaattgaaatttagtttccaaaaaagaaaaaagatgagaagaggtagccccagtctaacttaaatttatatcatataattccttttagttctgcatatcatacttctaaaaggttgtattcaaattgggacatattgaaaggacagtgaatgcagagttgtagaacagttgaaggcacttgaaataaattgcatatttggaagattgttttatggaacttcatactcctgatcttgagtgactctcccacctcagccttccaagtagctgggactactggcttgcaccaccaaggctagctaaatttttatttatctttgtggagatgggatcttgctgtgttgtccaagctggtctccaactcctggcctcaagtgatcctcctgcctcaccctcccaaagtgctgggattacaggagtgagttactgtgcctggccctaaatcccatattttaaatatccatctgttactttgtgaaacctaatttttccaaattgaagaatccattgtatgaatccaccatgtttttcctatctactctcccagtaattggtagataatagtttatgcatatatttaagtcctgccgatttgttcgtcagaatgttggtgacaggctacagtcctaccagcaatgcacagagatcctgacatccccatttccccctaaatacttaacattttctagtttctaattttttactctttgaataaatgatacctcatttctaatttgcatttgtcataaatttgttaacttttggaattaccttttcattaaattgcctatttattagtctttttttccattgaagttcatctgtttttcttgttaattttgagggatgtgtcatattaataatttaaaatattaatcctgaaaagcttttgggtagaacacatttctttcttctgtaatgtgaatactaatattgtctttagctaaacaatatcccgaattttcatgtaatccaattcatcaatttttgccttgtggtttgtactgttttctttaagaattcctttacttcctctttagtcaaagatttactctatgtttttttccgccattaactttgtaattttacctttcacattttggtattttatctgtgtagataaagttacagagcttaacattatatatgatgtgaggcaaagatccaatatccattttcatttatttcttaaagtgagccgctttttctagtggcatgtacttgaggagtccagatcctggttaaaaacctattgtgattttttttcagcctgaccataagtatttcaaaaggctttatttagcaagcttcacagggaaaaactactctccccgcaccagacttggtgcacagccaatacattgtagtctttgaaggaatttgccgtccaagtactctggacttcctggctagctatgctcttcatgtatttccattactagcccaggcaccttttcccctagttctctttatctgaggcctttggcagaggtctttatcaggcaactctgtcaaacctccttattggaagaaggaggggaaaaccttagagacacttttcccccttctcactcactgttcagtactttctactcctagccctctcccctttcttcctcgtctactccaggctctataaaactgccagagcctttatttgggactccaacagcagtgagttgaccccatttttctgctgatctatccacctgaccctcgacttgtgtgctgttccatagggaaattagaacaggaagaaattagtgctttctcaagttttagcttctctgttgttctatagcagttaatgattacagactttctcattactttcattttggtttattattacctaattttttactctgacacctgacacttgagtgctcatggaactctctctaactgttgagctcctgctaatacttaagcagtggttctcaaagtatgctttttggaccagcaggcttcagtatcagcatcatctgggagcatgttagacatgcaaattctgtggtacttccccagacctactgtatcaaaaactctgcatgtggacccatcagtctgtttcagcaatcccaccaggtgattgtgatgcatacttaagtttgaaaactactcaactaacagtgtacctttcacacaatgttcatcctgtttctgtatcatatatcgtgttgctgtatgtacgtgggcctctgagctttctattctgctcctgtagtctgtttattcttgcataaataccatagtattttattactatcttttattataatgtggtatatcttaatatgtgatatcactagtctcttctctcaacactaaatatgtcacttcacacttttttgcttacatggtttctaaagagaaatccactataattctgaacctcttctatgagttagatactttggatctctggctgttttcaaaatttcctccttttctttggttttgtgtagtttgaatataatacatatactttaggtgtacattatttgatatttatgctgcggtagtgttccctgagcttcctgaatctgtggttcaatgtttgtcattaattttagaaaatttgtggctattgaaagctattacttgaaatagttctgcttcattcttcttttccttttgatttttcagtgtgttacaccttttgcaattgtctaacggttcttggctatttttgtttgattttttgccctttattttttcctaaatctcaaaattttgcactagatttaggaagtttttattgatctatgttcatgtttgtaatttttgccttagtcatgttgaatctactgatgagcccatcaaaggcattcttcttttctgttttgatttctagcattttcctttgattctttctttgagcttctgcctatatattatccatccattcttgcatattgtctgctttttccattagattcctaattatattaattgttatttttaaattcttactctgataatttcaaaaatgtttgtcatatccgaaactagttctgatgctttctttgctccttcagacattttagccttttagcatgtcttataactttttatgatgtactatataatagcaactgagtttaacagaattttgtgggacttttaatgtaaatttggctaagaagtaggctatgtttaatattttctcttgctgtaagttgccagagggttcaagttccttaagtattcctgtttttgtctcccctattgtctttggcttccctaagaactcctccttatacagagacttacagctctttcagctattatttattgtgaatataccacagccctcttgttttgatggcaaggggttggggaaagaagcattccataacattatgattaaatctcaatgagcctgtgactttcacaagtgtttgctagcttcctccccaacccccacctcctttatgtgagataaaaaggctagagcgcgctggaatcttgataatgccctgaccctagatgagataaggttctgataaagtatcttcacctgaagaataggcctttcctattaagaatgctctgggcatatttcataatggttacacttctcttcccttcgccagaaccatgagaagagcttttatggtgcattacagggagatactgatgggattcctggagggaagacccatgaaagtatgagagcaactaaccccccgaccccacccctcaccaccatcgcaaagccttctgcccccaggagttctcactttcatatttatcctcactcagcttccaacaattcctcaaaattgtcattgaaataattgaaatatttttaccagtttatatctccagcaacttctgctgtggataaacagattttggctatgattcactagatttgcatatttctccaaattttgaagtggcagtttggctgtgacagttcagatggatataaggagacatcattgatctttagtttgttccgtttttttcttgttgtaaggataggaggagtaatgacttccatgctttttatgtgtcagagctgaaactagaaaatatatctaaatatatgttttcattatctactttagcagtttttgaaagtttatttcaaactttaagccttttcttagattaaaagcttttttggaaggcctttcttacaaataagaccagtaaaggcataaagtagggatgaggatgtctagtactctgctggagggactttgaaaattattggtactaagtataaactaatcagaaccagagctgaacacttctgaatacaattgttatttatcaagcaatctgtcttttattgatataagtacttaatattctctttttcactacacatagtactcagtcatcattattcacagtgttcaccgtgtgccctcatatacttcatagaaatatagtttattttgggggcagggagtatattgtataatagatattttatatgagtgtagaaaacaaaatattctgcatgaaattcccctttttggccacgcgtagtggctcatgcctgtaatcccagtgctttgggaggccgaggcgggcagaccacctgaggttgggagtttgagaccagcctgaccgacaaggagaaacaccgtctctactaaaaatacaaaattagccaggcttggtggtgcatgcttgtaatccagctatttgggaggctgaggcaggagaatcgcttgaacccaggaggcggaggttgcagtgagctgagattgcaccattgcactccagcctgggcaacaagagtgaaactccgtctctcacaaaaaaaaaaaaaaaaaaaaaaaaagaaagaaaaatatcttttcatctagggaatgtgtgtttcttgcatatggaagagtaaggcatcgttttttaattttctacattttttctttagatgtatgtgtatcttttacggaaatatatcaaaagagtttgatgtgattacttcatttcctatctaaaatatatttaaaatatgataatctttctcaatatgttacttatcaaatctgcatttcatcataattataaggtttttgtgagtgaacagatgggcttttcttaggtcttctaacaacttaaaactctcagcttaattttgaggagtgggcagggagtctaatgtctatataaatttttttttattgaccttccaatttctgtcatgttatacatgcttctgacctgttttgccactaaaccagtaatttagtccattactggtctgtgtaaatcttagccacagctatttcccaaggtggttttgggtctaactagtggttggtgttgatgtccagcaggaaatcgtgcaaaccagatgattggtgtggttcaaactgtaaccttgttaaaggattggtcaggttgcacttaggggagttatttaattagtttcccaataatgtttgtgcacaatttttaggtgaccactgattttttctttcatcatgattcagaaaaagacagttacttgtttttatcacagtcaagttttaatccagtattctttctactttatatttaggcagacattttgataaccagtagtactgctcttgaacaagagtatctgtaatgatattatgaagttaatttgagggctttcaatgtaccaggcaacatactagaaaggatttttttaatataaaacattctttgcctttaataagctagtaacattatcatgggaaacatataaaatgaattataatatataataaacaatacattcgtgatggaaacatgctctgggattacagataacagaccagtcaattcttgactttttagggaagaattcacaaaagaattgacatttaaaagggccttgaaagactggcttttgactagcagagaaagtaagggtattatacatagaaatagtatgagttaaaaattaagttccttaaatgcatgtgtattttttcttcaggtagattgaaatattactcatgtaaagtaagatgcacacattgtagatgtgccactctatgaattttgacagacttacacaattttgtaattacaaatcaagattaaaaaaaaatttaatcgcatcccaaaaaaactctctgatgctctcttgtagtcaatctgtaatgtatttttaagaactatcaagtagaatctttagtggaaattattttgaccttttgtgattttgagtcacttcattctgtatggtacatttcatcaggaatttttttttctagccttctaaatgtggcttattttgttgggtgtcttagtacagtaatttagggaagactattataagtgttaacttttaatactattacaaatatttattttcattttatgttacaatagctatttctaataagtgggaaatgtatgattaaaataatcttaaatagaaaacttagtttatgatttttataaaggtcaaggcatcccccaaaaatcaaaatgatagtttttaaaaggaaaggatggaatagaacaagggagaaaatgcttaaaataagtgttttgacttacaaacttcaaggtaatattaccttagatgtaggatttactctctattgtcagaataattcttagcacattcttgtatgatttccaaaatcagatatattcactgccctaaaggagttcacactctggaatggaaatcttattactaacattatatttattgacacacaacattattggaaaaagtagacattacattgaatttgttatgaagaaattacatactgtatatattagaataaacctaagaaattatgtatagattccattaaatttttgtatatgaaaatgttagcattcactatttaaaggatagtgaccttcattacagaattgataatccatttgtgaatttttccataaacatgtattagcctaaaaattattccacacttctctgtttccatatgtagttacttttcctggagaaatatttctagacatctttatgtcatactcactgttacccagtgaaggaaagttccttatgtaatttgtgagtttagataaaataaataaacttggctgcttcagttccttctccccatgcttttcttggggtctgcttacctgcagagactacatttttgactacttgtcttcgtattagtttatatagagaaatgctctgcccatggcatgaatggcctgtacttgctcagtattgccattgacttaggcttgtaagtgtgtctacttcagcacaaaattttatgtagaatatttaaaaactttgcaagtatgacatttttaatctctcttcattgttgagtcttaattattacattgtgttcagagaattatatatcacacacacacatatgatattaattctttgaaatgtgataatgtcctactattgggtgagtttccataaatgtttcacatatgtttgaaaagaatgtatattctccaactgttggttttagtgtttcctatgtatctattaatcaagcctgttaaattcacattttgttaacatactgattttccattgcttgatccattgattattgagagaagcatgttaaaatgcactgctacaataataggtctgttagtttttccttctgtttctcttactgcttgctttatggaatatgaagttatgttattaggtacaaacaaaactgttctgtcttcctgttgttattttgtagtgatgtctacttttgcctaaagtctattgtagatattaatataactatttcagttttatattggttacagttttcctaatacctatttttccattcattaattttcagtttttctgggtttagatatatctcttataagcaggttctagctagatttttgttcttcgcagcatccttgaatggaaagtgcagaaagttcccatatacctcctgtcccccaaagtgacctctctgccattgtgaattccctgtacctttgttacattccatgaatctacgttaataaatcattatcaccataatttgcattggggttcagtcttggtggtgtacattctaagagttctgacaaatgtgtaatgacatatatccaataatgtaatatgatacaaaatagtttcactgctctaaaatttctcagtgttccacctagtcatccttctctcccctcaatccctgacactgatctttttactgtctctatagttttgccttttccagaaggtcgtatatttggaaccatacaatatgctgcaactttttaatactgacttctttaacttagtaatatgcgtttaggttttctctgtggcttgatagatgatttctttttttcttttttaaattaaatttaatttaattttaagttccaagatacatgtgcaggatgtgcaggtttgttacataggtaaacatgtgccatggtggttttctgcagatgagttctttttagcgctgaataatagttcattctttggatgtaccacagtttatttatccatttacatactaaaggacattgctatggtttggctctgtgtccccacccaaatctcatctcgaattgtaattctcatatgttgagggagggacctgatcacctcctgtctagggagggaagtgtttggtttatgagggcagtttccccatgctgttctcgtgatagtgaattctcatgagatctgatggttatataaatggtagtttttcctgcatgctcacactctttctctagcctgctgccacgtaagacttgcttgcttccccttccaccatgactgtaagttttctgaggcctcccaagccatgtggaactgtgaatcaattaaaccttggtttgtaaatttctcagtctcaggtatttctttatagcagtgtaaaaacaaagtaatactgacatcgtggttgctgccaagttttggcaatagataaaatggatgtaaacatccatgtgcatgttttttgtggacatgagttttcaacttatttgggtaaataccacagaagtgtgatttctggattgtatgttgaaaccacatttagttctgtaagaaactgttaaactctcttccaaagtgtctgtaccattttggttatgcaccagcaataaatgagaattgctcttgctccacattctcaaaagcctttggtgatttcaaatgctggattttggccattctgacaggtatgtaatagtatctcgttttaattcacatttccctgatatgggaaatgtgatgtgaaacatcttttcatatgcttattgccatctctgtatcttctttggtgagctgctaaagtcttttacccatttttttttaagtcaggcctttttttgttgttgagttttaagagttttctgcatgctttggaaaatagtcctttatctgatacatcaatcttacgtattttatcccagtctgtggcttgtcttttcattctcctgacactatctttcatggtgcagatgtttttaattttaatgaagttcagcttatcccatttttgtgtgtgtgtgcgaattgtgcctttggtgttatatttaaaagtcattgctgtacttaagatcatctagattgctttcatatattatcttctagcagttttatagttttttgtgttttatgtttaggtcttattttgaattaattttcatgaaagttatatggtctgtgtctagatatagttttttgcgtgtggatgttcagatgttctagcaccaattttttaaaaagactatcttttctccattttattcctttgccacttttcaaatatcagttgactatatgcagttctattttctctctgttctgttccatttatctatttgttgattcatgtgccagtatcatagttttgattactatagctttatagtaagtactgaagccaggtaatgtcagtcctccaactttgtccttctctttcagtattgtattggctattctgagtgtttgtctctccctgtaatctttagaatcagtttgttgatatccataaaatatcttggtagaatgttaattgaaatttcattgaaactctagaccaagatgagaagaactgacatcttgacaatattggatcttctgattcatgatctcagaatatttctctatttagtaatgatttcattcatcagagctttgtagattttctcatatagatcttatgcatattttggtagattggtaattactatttcctttgttggagactagtgtaaatagtaatgtgtttttaatttcaaattccacttgttttttgctagtgtaaaggaaaaagattgactgttctatataaatcttgcgctgtgcacccttactataattccgtattacttccaggagtttttgttgattctttgggattttttatatagacagtcatgtcttttgtgaacaaaagatggttttatttctttcttcccaagttggaacatcctttccttgttattggtcttaacaggaaagcatcaagtcaccattaagtatgttagctgtagattttttgtagatgttctttatcaaattgaggacatttctcttgttttatagttcgataattttttttaaaaaaatcatgaataccgattttgtcaaatgctttatctgcatctattgatatgatcatgtgatttttttttcctctttagctgtccatgtgattgattacattagttgatttttgaatgttgagctatccttgcatacctaggagaaaaacccagttcattgtgacatattattctctttatacattgttggatttcattgctaatccaattaatttgctaatttttgaatttatgttcatactgttctgcagttttcttattaggccttaggccttggtctggtttttttttttttgattggggggtgggtaatgctggcctcttaaaatacattagaaagtattccctctgcttctatcttctggacaaaattatattgaattagtataatttttccttaaatatttgatagaattcaccaaacccatctgaagttggtgctttatgtttttgaaggttgttaatgttttgattaaatttctttaataagtataggcctgtccatgttatctatttcttctttgtgaattttggcagatttgtgcatttttaaaaattggtccattttgtttcagttaaaaaacttgtagacatagatttgttcatagtactattttattttccttttaatttccctgggatatgcaatgatatcctctcttttacttccaacattagcaatttgtgccgtctctcttttccttggttagcctggctagagacttactgatttttattgatcaaataaaaaccaaataaccagcttttggttttgttgattttttttcctctattttctgttttcaatttcattgatttctgctcttatttgtatatttattttgttttgcttactttaatttgctcctctttttctcctaaaatgaaagctaagattattgatttagtatttttctaatgctaaaaatatattctgggcactgcttttagtacctcccacaaattttgataaattgcgttttttttttcttttagttcagagtgtttttacatttctcttgagacatgttttttatcccatgagttatttagaagtgtgttgttatccaggtatcttgggatttttcagctatcctacatctataactatcctaatttctacttgaattcctttatggtgggagagtgagtattctgtgatttctattcttttaaatttttgaaggtttgttttatggcttagaatgtggtctatgctagtgaatgttccatttgagtttgagaaagaatgtttattgtgctgttgttggatgaagtctacagatagccagtatatgcagttgatgacagttttgttcagttcagctgaggttcttatgatttgtggccatctggttctgttcatttctgatagaggtgtattgaagtttccaactataatagtggacttatcttttctccttgcagttctatcagctttttctcccatattgatactttggttgtgggtgagtttgcatccaaattgttatgtctttttggggaaattgacccctttatcattatgtaatgttcctttttatccctgataatttattttgttctgaggtttcctgtgtctgaaatatagctagtctgtctttcttttagtgttaacatagtatatctttctccaacccttaattttaatctacacatctttacattaaattttttattttggacaacatataattcagccttttttgctccactctgacaatctctgtcttttaattgttgtatttagatcactgatgtttaaagtgattattgatctatttagcatagtgtctaccataactattcttgttttctgtttgttaccctttttttcctaattttgtcttccacaattttctgccttttgtggtggttttatctgaccattttatatgattctttttttctttttcatcaaacttatcaaatctttctctttttaaatttctttttatggttgccttaaagtttgtactgtacatttacaactaatccaatttaactttcagaggatagtatgccatttcacagatagtgttaatccttataataacataatgattcaaattcttccattctgtcccttgtatctttgttgtcattcatttcacttatactcagcagatattaatatatgcataagtgtacatatcaaatatattgttgctattattttaagcaaactactagatcaattaagaataacaaaaataaaacttttaaaattttacctacacttattacttctctagtgccctcttttatgtggatctgtataacttgcatcattttccttgtctctgaagaactcttttaacatgtcttgttgagcagattttctagcaacagattatctcattttatctgatcaagtctgtatttatccttcacttttcagggacaattttgcagggtacacaattccagattttttttttattattatctcatactatgtatctcagcatagaaatctaacatgttctgtagaaaaacatggtaatgcatacttttaggaattcatgtgtactctcctccaatcttgtagtttaaaatgcccatcgccttattaaagattttatattaaaattgtacagctgctgttaatcttctttgatcccagaaatcttttttttttgagacagagtctcgctctgtctcccaggctggaatgcagtggtgcagtctcttttccttgtaggtcactcctaatacttgtaatgccattttctacaaagttgttctatacttcatgttttagattgttattaaaacaatatttaattaaaaaaataaaattccatccatgatttatcagtaaaagtgtcctttttttgtgggccttttcaatatttattcacgtgtacattattttgcatagttacaatgatgataatggtttcaataattttatattttttcttcaaataacattttataaacatatatctagcttgaggcatagtttttatttaattgtaccatactcccttgttgtacatttaaaatattttgggttttgcactttctaaagaatgttgccttatatatcttcatgcatattgtttttattcctttgtattacatgaagtgccctgcttttacaaataatccattgttaaatatataaggctgattaataacctttcgtgatataagagtttttatttccaagagagctaaacattttgacattgataattctaccttacctttacagctagattcttcaattatgttatttcaatattatgtactggtctttgaatagaattcatttagaccatcctgtgtccaataaatatctagctaaggatgacaattcatatctttttaaatgtttaatgttttcattttatcacacttgcattcagcttatgaatcctgtgcctcttatcactggtttcaacacttttcattttcctttttttttaacaaaataatttgggtaaaattcaatgttctgtcatagaaacagaatacaaatgataagaactatgcacctgaaactggttttgtgtctggtagattctcactctgcaataaagtattcttttgtcaactgatttttttaaaggtctgattctaactgtattaggcacattaccatataatttatgaaagtggagtttataaaatagacatgcatgaaaaattgaggactaaatacgtagtattttctgatgatacatttttaggaataggaattgtagagtgtaaggatgtttatgacacttaagcatcaaattgtttcctcaaaagtactatgttaattgtgctacagtttgcaagtgtgcattaatctgtttctttcttttctctgctgctatggtatggatgtttgtgtctcctccaaaattcctactgcaacttcagcatctttgtaatgtccatatctccggtagtaagaggtgggccctttgagagttgattaggtcatgagggctccaccatataaatgggactagtactttacaaaagggcttgaggggcaagtttggctcttctaccatgtgagaacatggcctttgtctgctcaagaggacatagcattcatggaccatctttgaagcagagaacaggtcctcaccagatacagaacctaacctgctggtgtcttgatcttagactttctagcttccaaaactgtgggaattttttattatgtataaatcatccagtctgtggtattttgttacagcagcacaaatggactaagatacttgctaaaataattatcttatatacatgcattatttatttcaaatgcccatttgaaggcaactgttaggttgaaataagtttatggatgctccctgacttaatgacagtttgacttaggatttttcaactttctgatgtgagaaagctgtatgcattcagtagaaaccataaccctgtcatgagttgagagacttacaacttaggatgcattttcaatttatgatatttttgacatagaatggatttatcatggcataaccccatcttaagttgaggagcatctgtactaagttgtacataggcactcatagggaataatagaattgggatacattttcaaaagctatttcacttgaaaatggttgaaacagaaataatcctctgcttaaattgaggattgtcacaatctttggcatttaataaaacatacactatccaaatatagagacatcatatgaaaatataaaccaggcctgcctttttaatgctgatgcatctcccaatttttgtgtcattcctaatcactcccttaagtcaaagtcctacttaaataggaagaacaacttatttgctaatttttttctcatgcctatcagtaatatggctatttggttgaagtaaatctgctattatagttttatgttttattcatagtaagaagcttattgctattattttgggcttgtggtaacttctttaagtagatttaatctcacagtttatctatgttaggttttgtttccaaatattatttaatctgttggcccataaatgggtgaaatgtccgtgaatcattttattttaagaagtttattaaatttatttagtgtcttttaagtcatgttaagtggaggcgtatttacgagtgtgtttaagacaatcttaccagatcacttgatcttactcaatgtttaagctttatagaaggtaaaataagatgctcatgagtttctgttacagaatatatactaaccccctccacacacaatacacaaaataatgtgaagtttgtggatgtatggtcagtggaagtttatacctgaacatgagccaccatgattgcttagtctaaaatgtaatgtacagaaaactgccatgtgtgattgtgattaaatttgtctacaatatcttttgtgactcacattccaggaaagaagaggttttttttttctttcttttttctttttttttttttttaacaggaatcaagtaaaaaccacagaacctctatatttatatttgagtctgaatcaaacattttcacttggaagaattttttccaaaggaggggaaaacaactgtttctgagtgcctttattttaggttaattttttcaaaagattatctctgacacctttgcattaagtatctaatgtattagtgggactccatggtttgcatttatttcttcaatttgctaaaaaaaaaaaaagtctactaaaatttcaatttttgaaaagcaattaatagaatatcttagataagcaaaatgtaataaactcttcactatttttggatgaggtctactggtatagatttcagttaattttcctaatgcctttttaaattctggaaagccatcttgttaaccagagcaatcagggtaaatgaccacatgtaacctatgttaccgtgaaaacaaagcaatattaacttttccttaactagtggctttgtttataagtaggaataatagtgaagctgtatggcctgttttgtttctcccatattgcctcactaggtatgatggtaagtaattattgcctaattacagagccctgctgtgaaatgaacacagcctgcatgtgtcctatgcctttaacccagttcgtatacaaaccaattagtataccagtctaaagctagagttaatgattgcacaactcttaattttagattgatcattgacctatatgtaaaagctcttagaagaaaatacagtagaagatcttcttgacctggatgtaggcaataattttgtggtacacacaaagcaatagtcataaaagaaaaatcgataaattagggtttatctgattgaaaacttgaaaacttctgctacttgaaagacatcattaagaaagtgaaaaggcaagccacaaactgggaaaaacattcatgaaacatatatctgacaaagagtttatatccagagtatataaatcagtaataaaaaaagagaactaaaaatatatgaacagcaggcttaaaagaaaaaatttagaggctgggagcagtggctcacgcctgtaatcctagcactttgggaggccgaggtgggcggattgcctgagctcaggagttcaagaccagcctgggcaacacggtgaaaccctgtctctactaaaatacaaaaattagccaggcgtggtggtgtgcacctgtaatcccagctactcaggaggctgagacaggagaataatttgaatccgggaggtggaggttgcagtgagccaagatcgtgccactgctctccagcctgggtgacagagcaagactccatctcaaaaaaaaaaaaaaaaaaaaaaaaaaaaagaaaaagaaaaagaaagaacttagaaaatataagaatggccaataagcacatgataaaatacttaacatttttagtcattatggaaattcagtttaaaaccataatgagagagagacttttgtacatccagtaaaatagctaaaatttaacagactgaaatcaccaaatggtgagtgtgtaaattaataggaactctcatacattactggtagtacaaccattttggaaaaagatttgacagttttttataaatttaatcatacacagtcctactaagtatgcaaaagaaataaaaatgtatatcaaagaatgtctgtgattcctttattcacagtagccaataactggaagcagttctaaatgtctatcttcaggagaatgggtaaacaaattatggtatatttatacagaggaatgctgcttagtaataaaaaggaatttactgatacatacaactaacttgtatggatgagtattacagattttttggcagagcgatgaagcctgtgtgtatgtatacatatatatatatatatctcatatgtgtatatatatctctctctcatatgtgtatatatatatatctcatatatatctcatgtgtatatatatatctctctcatatatatatctcatatatatcatatatatctcatatatatatctcatatatatatgtatatgtgtatgcatgtgatatatggtcagaggaaaatatcagaacacttgttgctttggggaaagggaattttttgggtaatgaaaatattctatgtcatgataaagatgtgtatcacacagctaagtgcatagctaagattgttcaagcttgtatagctaagatttgtgtattttcatatatgtaaaatctacctaaagaaaaagacttttaaaataatcattatcaagtaggtagtgggtggcattacagatgataaaagattggcagaatattgataattgttgaaagtgagtgataggtgtagagagttccattattctattttgtttactatctatatgttcaaagcattctgcagtaaatgtttaagtgtgaaaagaccaaccacaaacaaaagaggaattactactgcctgtgtattcagagaacacattgaatccaggaggatgcgttgtcattctctaggtgatagactgaggagtattaagaatgaagtgttgagaaaaggctatttcaggcattcatgaaaattcgtgacatattttacttagaaccacattgttatgtgtatgaaatgatgaggagtttagacgttatacaatagaccagagtttttgagtccttgtttgccaaggattctttgaagatttgaattcacagtgtcattatacataactctgaaaaaaataatacaagggcaattttctgaaaaggccaatttgccgctgtgaatggcacatactgtgtaataaaactgttctagatttttagagtgatctgaaaaagatttgtgaagtctgaaagtttcacataccaagaacaaaaatatactttcaactttttggtttatctttcttgttcactcagagggcatggatctagaataccaaatcaaaaaatgagtatgaactgggaagataaactcttgagtgagtattctatattctcagtagataacaatgagaaagtatatatgttcattttagatcagaaacaaaagaccgtttttgaaataattgattatattttacaagggaacaaggttttaaagtattttatgatcaaatgtcaaagtatgtttgtttgtttgtttgttttcatgaatgaagagaataagtgcctaacttgtctcagattttggtatcagttctataactgtttcctataagaagaaaggcctgtataaaatagtattgaatatatgcaggaggcttttatgaggtaacattgtttatgtgtctgtatatggattgtatgttatgacggctcacagctaaaaaggtttctagtatcctgtatctgttaaagttggaaggagatggaaataggatgttctctaatttttttaaatagaaatctcatggtttgaatttttttcttccaagttctagtttaatgaattatctgttatgatctaggtctctaattcttctcccttaatagttaattaggataatccagaaaaggagtcctaggcaaaaaaaaaaaaaagagagttaagcaacatttcttagtctaggatatattccatttttcttgtcagaactataatttgctgccctcgacctcttttctaagctttaaactaatatttcaacagacttctgaacagcatactaaaaattaatactccattggcatctgtaataaaagcaaataaaagaggctatatagagcaaagtggtttgtaattttttatttattcattcattcatgcatgcatgaatgcctatgtttgtttattctataaatacactgagagcctctagagggtaaacttctgtaaggtctaatggaagcaacagatggatggcaggcaacagaatgtttgatagtacttaatgacaatagaaagaaaacctaatatgatgaaaaaaagaaaaatgagactagcagtagagccattagcactgagacttagacatgtgtggtgccactattagcatgtactcttgacagtgtttctcaagctaactgggatgacagaacattttttaaaaatctgtcaggggtttatacttgtacaaaatagaataaaaattattagacaaacgaaatggaaaataaatacaaagtacaaccctgatgttttgttattaggtccaatagttataaaaattaataaatgtttataaaacttgctaaacgcaaactataaatttctatactgtggtaacaatagtttgcagaacctgtttactggtttttgaccatactatttctatatccctaaacccttcagtgaaggggaatggtgatagcatcattggtcacaggcctctaggaatagcatagccctgtttctatagggttatttaacaaactgaatgatagcacagtaaattcacttaatgtgcccctgatggaattgttgtgctaaagaatttattcgttatagaagtctgcccatcagcaacaaattaaattatatgttatgaaacctattgaggtggagaagaatggcattcatttacaaaaattttctatcacaatttttaaatgctgaaatttgtcttaggggcatagttacgataatttagaaatttattttccactgaacaattcgtatttcaattgtgatgggtaagattatatgaatgtaatatttgtgaaaaataatcacaaaataaaatttgggcagccagctagccaagagagattgcatttggagaatagtaccaatataagtcccgcggaggtacttcctctgccattttaagatggaatactctgcagccattaaaaagacaagatcacgtgtttgtgggaacatggatggagctggaggctattacctttagcaaactaatgcaggaatagaacaccaaatacaacacattctcacttacaagtgagagctaattgataagaactcatgaatacaaagaagggaacaacagacactggggtctacttgagagtggagggtaggaggagggagaggagcaataaagataactctcgggtactgggcttagtactttggtgatgaaataatctgtacagcaaaccaacgtgacacaagttcaactatgtaacaaaccttcacatgtactcctgaacctaaaataaaagtttttcttaaagattttttttttaaaagcagttccttctgctcaatcatgggaggatagaaagattagaaatttattaaaacaatagaagcatttcagcagagaatatcctgcaccaacaccttttctttttctttctcacttctttattagctaaactataccttttctccttctgatgttttgacctagtgtcatcttaaagaaatttaaaatgttagtcttagttatatatcagtttgtttaaatctgttttcaaaggagtgctatctaacacttagatttattattggcatgtactgttttaggaactaatatcaaatgagtgataatttagttgacatttgactatgcaatcctcctaacagcatattatggtgggtattagaattatttgggatagttggataacttgccaaaggttcagagctggatttggtgaattaaaacactaatctatcctacctcttagtccccctcccccacaaaaaaccccagatcagtaaaatgacacatataagggaccgaaacaaaaccaacaagcaaaaactaactaggacaaataactatgaaaggagataacaggtgtacaattatcaactaatttagcagagaagagcaagttgtaatcttagcttattgaggtgaaacccatgaagaagctggtttgtcctgcaaaaccctagaaagctgtgggaaatacaagcactaggtgctgtatagctctgaaaacaagaggaatggttgaaagtctatatgactagcagttgtgttctcaagtcctcttgtgcactgtctcagtcagctcaggctgccattaaaaagcacccaccatagactggcttaaacaacaggaatttatatttacagttctggaggctagaaagtccaagatcaaggtttctgctgagtaggcctcttcttttggcttgtaggtagccacagtcttggctgtgtgctcacacagagagaatacgcgagtgctcttttccccatcctcaggactttgtctaatcccagttacctcctaaaggccccatctccaactgctatcacattggggattagggctttggcatataaatttgtgggggagggaggtaaaaaatatttattccttaacacacatcatacttaactaggggatttattgtacatcctagcagaacaaaagagaaatcaaagcagataatctctgaactcataaagggcaagagcaaggcatgggactaaaaacaaggagattaaaccaaagaccattactgagcagtgaggtctccactatgcctcttaacacattgctcctagaatgctgaaagtttggctcatagcaccacttaagagactggagaatttttttctaagcaaaaagactggctcaagagaaaatgttcatagaactaacatttgggaatctccacaaccatgaaaaatcagttcaatatcttttgtggctattgtgaagcttactcacatacacagaatttcctttcagcatttttctgtttgaggttttaatataaatgaacataaaattgttaccaaacaaaaacatctcaaatgaagaagttactgactcaaaggaacaaataaaaagaaacttcaaggaaacagagacagtttagaagtagggagagccctccccttcaaaaaactatatttatatagttttttgtagttttaatataaatacagttttatgaaggtgagaggtcctcctacttcaagtgatcctcccaacttagcctcccaagtagctgggactacaggctcatgccactatgcccaactaattgttgtatttttttgtagagaccacggttttatcctgttgcccgggctggtctctaactcctggactcaagtgatccatccatcttggcctcccaaagtgctgggtttacatatgtgagccaccttgtgcggcctcaaaaaactataattctgatttataagagagagaaaagaaccaagtaactgcaacaaaaatgtccacttcagaaagggagaatgatgaaataaataacagtgattggtcagtagcagatacaaagtatttctggacaaaaagagcaaggattcctttctccaagagtggaacaatttcattgattaggtgctctggcagtccatgattgttttctgtaggggagtctcctttgcccgttgtcctgttattgttagaaaaggtgtaatttggtatttttgctagagtacagtttgagagtatgcattaaaatatacaacttgctcaaccttcagcctgttaatatggtttctaggaatttctcataaggctataattgtacaatttcacaaagatgcatgcataaaaataaacattttttaaagtgaaaaattgggaacaacataaaagtctataaaaaggagaatggtaaaatatatattaaatttaacaaaacaaaaagaataatgctatatactatagagttccaaaaggttacagaatactacttatatataaattcattatataaaatattgaataaacagctctccagaaggatgtttgcctaagtgttatcagtgattttctttgggtaatgggacactgggatattttcacttctttatattttttataatgagcatatatcagtcttacaaaaatcaaaatacattgtattgaaacacatgggttttgaatagcctcttgtgaattatttgtttgctttacaaattatctatgtttaattttaagatctaaattttggctgggcacggcggctcatcctgtaatcccagcactttgggaagctaaggtgggaggatcacatgaagccaggagttcaagtccagtctgggcaacatagaggatgaaggaaggaaggaaggaatgaataaagaagaatgggaagggcagggcagggcagggcagggcagggcaggggaggggaggggagggaagggaagggcagggcagggcaggggaggggaggggaggggaggggagggaggggaagggaggggaggggagggaaggggaggggaggggaggggaggggaaattttccccttgccattaagtatctttctgaatcatttgtcctaataccaattgcaatttgttcaggaaacatcttattttaataatagtagtagtctgaaatgacaaaatcggaagcatagattactcttattctgttacagccaaatggcaatgaggccttacttgacatacggattacattatgtagcttttaattactataggtaataatgaggtataatgtactgggctgcttttagtattagataattactactaccgataatgattatatagggtaggattattgttgaaataaagacctagtaacttacctagcctctctaagtctcagctgactcatctgaaaataagaagaatgtggaagaattcggcagtttgttgtgagagtttaatgtggtactactacatataaagcactttcaacagtgcctggaacctcaaaagtgctattattatctataagtatgagaaaagccagtaacccagttgtattttctcaagtgaatctgtgattttacttaggatatattttatgtaggatgcttctttcaaacagtaaatttcaggtttgttcttacacaaacaagctcaaaaattgtcttctgttgtaggatactgtcagaattaagaaatgacattcaggaatgaattttataaacatcacattgtcattttagctaatgtaccctcttcaaatttagtttttattggaccacttaggaaatttagcccacttataatgaattacttagtgatttctattagtttgacttctaacattaccagttctttttaaggaacatttgttttctaagttattaataactccaaaaattttattctgtattttaattctaaacatttttgttttatttgtgttatgtttacctcttcccaagcctaaattgaatatttttggtctcatacagtttttaagtctaattatttgcctggtataatatctttgtatattttctcatatgtatatttcaaatagggttaggtattgtttctgatcctatgaaattctgcgtgcatctagatttacagagaatataaaattaaaatctcagttattaatacttatacgttaattatgtggtaagtctactcatttgttaattagctgccttacataatttcatatagtacccataatttctcagagtcatgtaatgatttgtatcacagtttggatttgtttttaaggaaaaacacatctttcatgtgattttacttactctcttgaaaaacacagatgaaaagtaacataattaaaagcaggaataacagattatcttaagtagacatggactgtttggtcacttactctcaatatagactgtctccctaaaaatgttttaaataagaacaactttaaaagacacaaatctattttaaaatattggatatccaatgagtttatatttaaaggaggcttggatataaatagcattccaaatctgagaaaatatcttacttgcctttaataactgaatgaaaaatatatgagtagcaatacatattttttagttttgtttccacatcagtgcactgttctggaacagtatttgcctcatcgttattggagatactgaggctgcaaaagttgaatattctcagaaaggtctattgaaacatcaagtgcttggtccatggtaactggttgatagttatgtgagctttttctgtagcacatcaaaataaaaatagatacattaactttatacacatttatattacctgttacataatatttcttggactcatttcatagatttagtttttgaatctgtggtaaaatcttgaggtgacaacaattaataaatctttcaattttttttaacaatgccttactaggaacacaaataatctatgatgatagttgttcatcaagcagatattttatatttctcagttatcatctaattgcttcattgcttctgttgctgcaagctaataataatcattttagtgagtaatttttcgaaatttaatcttggaaaatacatcattttctgattaatttttcaattttgagtagttgttcttaagttagatttcttgtcatatactctgttgaacttggggctaagaaatgtatcttggctgattgtagaaagatgaatttagtgtttttttctcctgaaccttcgttttagggaaattctcattttttccttttgtaactacttcaattttctggacaaatgaattctaccagctactctccttgttgacagatacctgtctcagagccataatataatttgcttatcattccttgtagcatcagaggctccttgaaatgctagatacagagaaggaactgttaaaagaaaaaataaaggaagctttgattcagcaatctcaagaacagaaggtaatactttaactgtgctcagagtgtagaaagaatgtgttctgttacctcaaataatacatttaatgtctttccaactgttttatcatttgacaggaaatattggaaaagtgtttggaggaagaaaggcaaagaaataaagaggcattagtatccgctgcaaaggtatttccatctgtaatagtgggttgcttgtaagtaagtggaattaaaaaatggaatatattaatagtattctcaatcttttataaaatgtttcattccataaaaatcgtttttatttcttttatttacttttaaacttaagatatgactacttatattcttattaaattcacatcacacaagataatggtagcattgaaatgctttacaatgtaggttattagttacttattataaagaacatatatgttgcaacactaatatccacctgctatttgttgcatctaattagaggttgtgtgtgcatctgtgtatcaaggtaagtaatttttaaagccaagtttaaaataactcatctaaatcatgtattcatagatataaaatatacacacaccaacaaatacacttttaacacttacttttgagttttagatttaaaattaaatttagcaaacaaatattgaatgtctcatatctgtgtatcactatgccagggttaaattcaagggtgactatgattttgtctttttcttaaataatttataatcagataagaaaaatactatttatataccaagagggcaaggaggaatgcactaaattattatgagtatgtacatcatatatctatgtcatagaagtttttttaaagcaataaattacttttgaattgagcctgaaaggatggctagcattctgaacagagtttgaattttattccataggataagggagacatattgacattttaaaaacatgtttgtgatctaatggtaattgacattaagttttgggaaagtagaggcaacaaaagctagaggcagggaaagaattcatagaatgcatcaaaagtctgtctaagagatactgagtggtagaaacagaccagtagtagtagtttggaaaggaaagaaatagacaaattctagaaatatggagaagatggagtcaacatatatgtttgatgtgaataatatagaaggtggacaagttgtatactgctagagtatggatttaagaacaaaatggaaagtagccctctttctttggaatagagtttgaggtgatttaaagcaaaaagtcaaattttagaaaactcgtatctgttttccaatatgtatgttcctgatgagatttatggtaacattaacaaatgtgatttttaaattatgatatacagaaatgtgtcagcatctggagaagacatgtaactcagtgaatcaatatttttcacataaaaatgttaaaaattatgcatcgataaatgattcattcagattgcaagaaaggactgtaatataatagcatgaaaatttcatttgacataattttattttcattatgacacctaacctttaagaactagtccttgtcaagttctgatgtgaaatcatcaagaatatccacaattatttaaactggctactaaatactcagtttttcctacaacctatctgtgtgagactgggttttctttatatacttcaactaaaaaacatcattacagatttaacacagaaggaagaaataagaattaatttagctgtcttctgttaagtcagatattaaagagatttacagacacatacagtagcattttccttttttaattttagaaagtagtttttcataaaatatattatttgttaatatcatgcaattatattaattttaaatgaattaataattttattttttcttgaatttctaatatgtattaatacatatgatcaacataaacaaaatctctttgatatcctcaataattttaagattgtaaagggatctttagaccatatagtttgaaatctgctactccaccctaaggcctgatttctttgaagattagaaatgccatggaaattaagtaggaatatttgtataaaaaagaataatagattttattttgtagcagttatttactatgcataaaaacagcaatgttagaactaaacactataggatcaaagttttttatcttttaggttaaccaagtctgttactcaagaaattattatgcagtctttcaaatttgttctggtctttatttattttgaagcttgaaaaagaagcagtgaaggatgcagttttaaaagtcgtagaagaagaaagaaaaaatttagaaaaagcgcatgctgaagaaagggaattatggaagacagaacatgcaaaagatcaagaaaaagtatctcaggaaattcaaaaagctatacaagaacaaagaaaaataagtcaggttagtaatattaactgttagtaaatatttacttttttctcatttttctcaaaatgaagtacccttactctatcttttatcttacttaaaacaaccttagtagatatttatgactttttaatttttaattttcattttgatgtttatattttgaattaatcatttttaatattttaatgtgctttcatctttctgatattgaaaacttagtaactgaccattttacccttttactttattttctaaaaggtcaaaacaaaatttatgtttagtcattgcaaatatattaacctttctgtgttgtttttccttttctcatacatagagacacatacgcacacatgcacacagactcaatcaatacaaaataatatatttgtgtagaaaacaatttgattcaattaatttataattctaatttgtaaatctctatacctatagttggtaacaataattaataaaacctcacaaatattccctatagtctcataaagatacataatgatcaacaggcatgacctacatgcagaataacttttgattgtttatctgacaattaaaaacactaccttagtttgtttttctgtaattgaatttgcacagttctattttacttgaattagtctttttatatatatataggcagaagtacttaaataaatcttcccttaagtatcaaaagcaaaagaataacattcatagaagtctaacatgttcaaactgttaaatatactacaattgttcattcacattataaatgcagctaaaatgactaacctttcagatcaacccagattttttttatgactcattaatcttaatgaagccgtaaaaagctcaaagtttttaatatccaagataaaagttatatttttaaaagatgtcacttgtttattctcaggaacacacagttacccatttattacaaaaattaaacagatctgtaggtaccatctatgttaaaataacagtagtacagtagcagatctttttttttcttgcgttttttcactaaagcaatattaccttctaattcttaccgtaacctatcaataaatatatattgagtacctattgcatataaaatgtttgtcacttcagttggttggaatttcatgccagtaaggtcaagttcactggctaagttcttattcgggagagtttatttaaatttgttttatgaccccgaacattcctgtaacctcacatagatgtgggccattcatcacttgaattgggtaagaaggcatgaaaaaaatcagcacatattcgtcatcctaatggaaaaatatatattttaaagagcacacttctctgctgatttgtcaagagtctacaagaaacatgcagtatatgatacactactttgaaatttgtcttctataggttcagaatatggtgaagacaatctaaacatgtcttgaataagttatattaatttccttacaaatgtttgcacgttttgctagaaagtctctgccaagttaaattatatatctctgtatcatttgggtggatttcaggacatttatttctttgtttggaacattattccttatttatttttcttgactctatatgttggtttctatgcattagaaataacagctacctctcacagtcttcactgactggccttgtactggtgaagacccacaccaatcaacctaatcagagattttgtgggcctctcaaacctttatgctaatccaaactgctgtgtttgttgttggcaccgcatagctgtctatagtacatggtgttccaatgcttgcagataggtgagacagaagccagtctcccaggagcccctggaaaaattcgaactttggacacgtagtccagctctttccctccctagggagaggctgcagtctgaggttttttgccatctttcttggactgggcaggagagtaggctataacaactgtttgcttgttaatttaagccgctatctttattctcacaggcccccaggcatcagtagtatgccaggtcctgttacggctctgagataggtaagacagaagcgagtaacctgggcagtttctagaaaggttggttggacatgtaatccaactttcttcccaccagagaagttgagagctgtgggtttcctttgatcatatggcactgtactggggatagggattgtggtgagagttaggtcttgagttttcctaccagtttcagtatagccggtttcatgcttgcccagggtgaaggaccctttcagtttgtctctggatttcccacaaagggtatttgtgcatgcgtcgttgtaaattgagtgtttccatggaaggacagaggatccagggttttcctgtttcacctcttgttgacatcatctggtattttaatatttttctaaattcccaaggtaaaggaaaaagtaaatgaataatgtatctgattataatcattcaaaaaaatgaaaattatgctagttgtaaaataccagctacaagaaaaataggcatgtagaaaacatgcagtaaatatcctgaagagtatacttcccagaagatgctttttaggacttaattgtatttgttgtccaaaattttcaaataagtttatagatatcatttattaattaatcatattagtttcctaggaaaagccaattggaaaaactaatatattactacagattggtttgtataaagtcccatgagcttaattaattaccctaaattagtttcgttgcaagactagaagtataatttataaatagactttacccctgggctactagtgataggaatctgaaatactgcctcttcattctgtacataccctggaggattttaactgagtttcacatttataattaatgtccttgttacttcttttagggaaaatccctcaaataaagggcattacaaaagctgacagatcattatctgataacaataagggaaacaataatagttccccatgttcaagtttcattaagttgcctttattctaagcaaatatattaagttagtttagctaaaaaggtatttttatgtttttttttttctttgtagctttgcctgcagaaaataatagcagtaagataatagcagaactggtggtggtggagatggcaataattaacaacattgactatcattaattctaagtgctgagcacttttctaatttttttagatgttttatgtcaattcctcacaatgaccttatgaagtaggtactattattatccccattgttacagatggggagactaaagcttacagagattatgtaacttgttttaggccatgtgactttttagaggagtcaacagtcagtattcaaattcaggcagtttaactcctgaggccttgtattttgccactactctattccatctccctgtgttctcatcttagtataaagtacagatttatgtcatttatcatttagtgtttgaaatgatcctaggaaactgatagataagttctataggcaaaactttaagaaggtgttatttttatgtattgtccattctgtaacatttatggcgcctctgccatgttttggcactgttacacgtttctgacacacaacattaagcaagatagtcaaggcccctgtgctttcacagagcttacattcaagttggaaaagagctatgataagcaaatcatgccgtgtggtgctgtgggctaggaagaaaaagtttggggttatatatttagctgataatggttgtaggggatttctttagacaatatagttaggaaagaagccaaactcagtaaattttcatttcatataagtcaatttatatgaaattctagggaagacaaaagtgatatgagagaagacacatcagtagttacaataactgagggcaggggaattttttgagggcgatgataatgttttatgtcttgattgtgatagcgcttatatttgacaaaacatatcaaattacacacttaatatttgtgaaaattatatgtaagtaataccttaatagagctgatttttaaaaaacaaatgactatcagaataactgactggatggatggtgattttggatgtaatttcatttactgaggtgagaaaaggttaagtttcatggggttaaaaaatctaatttgtgtgtattaaatgtgtgatgcttattcatgagcctagaggaaatgttgagtaggcagttagaaatatagaaatggaattcaggggagttgtcaggcctggagatagaaattttggattaataagcatatagttgttatttaaagccaaataaataaaaaggaaataatttctagatagggttctatgacattcttttatggattgtgtccatcttctacctagaaagaatatggccactttagattaactgtaaatagtttcacacgtaacagttttacttcagatgaaataatgaaagtgttaaagttattggtgctgtctgtgtcaccctgtaacccatgattgagtagccaggcattcatccagactttctaggaagctcaggtcaccactacgaacaacagcttctgccactttctgctgagccccagcctagatgcagaagtcagtgctcattctgtcttttaggtgtttggcagctagttgggatacatagacctgaagagcctctctccagggacctacaaactgttttgagtattaactgaagggactgactttttaaaagcttggaagccgtttttgaattctaaggtttaggtcacttcacagcactcaaatgttcttttaaagaaaactaaaaagcaaccataattaatagcagttaatatctttctttgtctactaagtcacagtagaaattaggaaatgatctagtatggcaacacaaaaacattgtgcaacttaagccacttcaattattcctgagaaatgaaaagggaaaaatcagcttctgctttagaatttacctccagatttcctctctgctagtactggcatttactgaggagataaatgttaaactatgacagaaaaccgagtacctaaggattgtggtagataattctcagaatttacttgagagatgttttcctttggccttgatcgtaagttaagactaagtcttagtgttgattgtaaattgtactttttttctgagataataagaggaaaatttatgaccctggcttattgattttcatattaaattaattctgggtcacttaaaagtctttgttaagtaaaggaaaagacgtttgttattgacaccaaagtaggcaaaaagaggatagtcattaattttgctgttctagcaaaatcctgtaaaagaactccagtgcacacagacactcaaactatgtctgacgttggaagctcttcataatggtttataaccacagccactgtaatttggggttatgttttcccgagaagccacagacattacaatcagtggttaaattttccttaagaaatttagtactgccacctgacccttcttttaaaaaaggaaatagcatttctattttagcttagcaggctattttcacaaccctgaaatttttctgtgctgacttctttagttttgattcattcattcattttaaattttttatttacaatactttgataataatctagatgataataaaatcataatgacattttaaattatcaaatgtatcatatctatagagaaattataccttttcatctaagtccttttttccttctattatatttttttcagttatagtcattcagtgagatgtctgtaatacaacatctgccaagtttttcagtccagagaatgagaattcatcctagattttcccttttgtcctcatttgcacaccttttttttttttttttttttttttttttttttaagatggagtctcactctgtcgcccaggctggattgcagtggtgctatcttagctcactgcaacctccccctcctggtttcaagcaattcttctgcctcagcctcctgaatagctgcaactacaggtgcacaccaccacacctggctaatttttgtatttttagtagagatggggtttcaccatattggccagactcaaattactggtctcaaactactgaccttgtaatccacccacctcacatctttttaattatcagaacctttccattttacctgaaaaataatccttaaacatatacacttacttcaaacctgttatctttgtctcaatattcttattgcttaccttgacctcttatgtagacttctttacctccagttttgtgccttttcaacttggagtgaaaaatggatatcattctcccactttaaattcttccagtgcctccctgtagcctataagataaaagataagataaaagttcaaactacttagcataaaatatacatctttcattgacctggtctttacctgtctagctcgtctgctgctgctctgtttcacatttcatgcttttagaaccaagtggctggtacacatagtgggctattttatggtcttgggccttggttcatactgcaccatcagcctagaatcccattgcttcctgactggcaaaacccactcttatttcataattcttcatttttaccctccataaaacttttatttcctccctgcagattaaatcaagtgctcctcttgagcattcagtatataactgtaccactgctcagccatattattataaaaagacctgtttctatgtcttctccaatagattatgagcaccttgaaaggaggagctgagtattaacaaactgcaatagattataatatataggaccagcactgttttaaggagacatactaatctttaaaaaatcaactgggtctccaacaacacaatttggctcttagagttttggtagcttttaattggaacattttaccaagattagagttatttaaaatagtgcttcggatgttattatcccctttttaaagaagtattcatcacactgtcagttggatgccaaactgaactgattcttattattgttactcaatgaaaaacttggaaaatactctgagaggtcaaggataattactttcagcttcagaaaaatgtttactttgaacgactagtatatatttgctctacagtgatgaatggctgcatgaatacaagtagaatttttaggtcatagtaaagtagtacactctctctcactggtcaaacggaagcattacattcaactataccattcatgtagattcaaaagataccatgttttaaaagacacatttccaaatcagaatgagaatgtcttagacattcatttgtacctcctcagcatctattcctctgttcccaatgtgatagtttattttttagcgatgtggtttagaggaaatttaacctactttctaatttacatataggtacttgttgatctaggctaataattattttccatccccatgttccaaggatgcatacataatttgagccaagctcttcagactcaatttgaggacttgcctcctcaggtatataaactctgttgttcacagtaagaaaatgaggaaatctttaaagctgttagtaattgtcttgggaccatatatgtagagcttttgagaaaatagaagcaacatcattggcagagctaagaactgaagaagtttgcctcctgatcacattgtttgcgtactagatggagcccactctgaagttcgtttacgttctctcatatgagactgtaactgctttttttcccctcaagtcaatttgtgctgaattttctgttacttgtgatcaaaagaattttaactgattgtcaaatgaatgtgctaaggagtaaagagggttagatttgagtcctagcttgtgactcatgtaattttgaccaagttttaaaaatgtatgaggcccactttcagatgtctaaatgggattaataatacctgctttgcatagttattgtgaggcccttagaaacgagacaaaaaagaaagataatagattggtgaaaaagcttagaaaccataactatcatgcaaatgttaggtggtattgtgacaaagcaggaaaccttgtcaaatactattgaaggaactgaagcgtttagccttgaaaagaaaaaaagataaagccacattcttcacatatttgcatactatatatacacatgtaaaaatatcaaagggatattatatatagatataaatatatctgtatgtgtgtgtgtgtgtgtatatatatattttttaacttagctggagagggacagatagaagaagtaggtgaaaatttttagctcactgctgtcttttggtctcttaaccatggggatacattctgagaaatgcatcattgggagattttgtaatgcaaatctcatagagtgtacttctagaaacctaggtggtacagcctaccacacacttaggttatttaggtatagtctgttgctcctaggctacaaacccatacagcatgttactgtgctgagtactataggcagttgtaacacaatggtaagtgtgtatctaaacaaaaaaaaagaacagtaaaaatacctgttataatcttaagagaccaatgttgcatacacagtccctcattgacaaaaatatcatcatatggtctatgactgtacaaactgaaactatgaaatcacagttgatctagcaaaatgtgcatcgttttatccaggattgataagatgaattgggtggaaggttgaagaatgtgtgtattagagaatataatctctactgtcctttctacactatggatatctgtttctattcctgtattattataggtgcagggcaaattcctacttcacagatttgcacccaattactaatatttcaaaaatctatcatttttataatttaattctaaaaagttcttttttctgaaataattacagtaaaatccttttacaatacatttaaaatacttatattgttgttttataagcttataactttggttaagtagcctaagttttctaaatttcagggtatacatgcctctcaaaatcatcctgaggatcgaatgataatatacctgaccattttgttaacttttaacctaaaaacgtaaagcatgacttttatatttttattttaatcctttttatattctatttcatttagctctatgtctttcacacacatctttgttgggtcacagaatcttcagtaccactaaattgctaataaggcagcataaattcatttcatttacttagcacagtgcctggaacatagtatgtgttgttcttgctaggatggccaccgttgttgcttactactattattattaccatgttatttactgatgtaattttcacatctaacatagtgccatgcataataagcagcaggtaaacagatggttactgatgattaccaaaatgctgtagttttccaaactgtgtatcaagagagggtgctgcaacgaattcataaggatgctgcaagttttttttttttaatcagaaggtaatgcagcaatacttgagttcttgaaaccagatgaactaccagcttgtcgatatttgtttatgttacatttctttgtcttttattgtatctttgtgaagctggcattttggatgttactgagataaaaagcaaatactatgcaaaaaccattgtggaacagaacatgagagtgttattatcccatcttattccaagggttaagaagttgtgcaatgcctaatatgtacaaaattctcatgagtagggaactatagttaaggatgaaataaaaatagtttcctttcaatttttatatattatcttttcaaatggctaagttatcacctacctaattaatatatggaacaactaggtatttcttttggcctagtaggagcatgaaaaaaattactgagacagcaagagagccataaactaagacagttgtaagaagctataatctagtgtgtacccatagaataagttgctctgggagacacaagaaatgtaatatgtagtctctactgttaagtagattttctttgaattggggaaacaaatccacatgttcattatgatgaactgtgcatctgcagtttgtaccagatactatcgtagtattctagtcataaagactatgctatgtcataaatatagtctgtggtttcaaagggatatccagttggtaagatagacaagtaaactgattattataattttgagctacagagtgctttgagagtgataaaatataagatattctatgagcacatttgaggagtactagatctacccacattgtgatgtagaaagcctggagcatttcaggaaaggctcctagagatgatgatacttaaactgaatcaggaagaaggagaagtaggcttattaaacagaggagaaggatgaagagaaatcattccaagctcagagagcatggcatgtccgggaaactgcagtatttcctatatacatgacatgagtatttactatatacatgaaaacatggtagcttctacagaagttacaagtatgaatgagactttctcattgttttcaaagatattacagtgaactacagaaatatgtcaaatttataaattgttccaatttgagatcgagtgaaatattacaaagtacaatatgttgaggcagttgaaaacacagagatggaaatgagcacagtgtttggtggatatcagtttgacaaatcgaaatgttttttgggacagtattataaaacagagatggaattaatatacatgagccaattatgagaacattgaagtcaaagagacaaattcggatttaatattatcacaaatggaatgctaccagaggctccactggcacaaaaaggacaagagctaaatattttttatggaagatgaactggacagccttaaatgtgatgcacagaagcaagaaaaagtctaaacataagaatactctttagaagttgctggaatacttgacatgcatgaagagggcagcatagcccacatgatggcagttgaaaaggtgaagaaaggacagataaacactttaaggggaagactgaacctggtgactggaaataggatatgaaaccaaacatgtctctaagacttgacattttggtgactgacaacatttgcttctgataaatataattcagcatgtctgtctctgggggtaataataaaaattgaccattttggggtaatcctggtcagaataacaataaatgaacaaaaaacttttttttgaagaagtatagcaagatggtggaatagaaggcttcactgaccatccttcctgcccggacaccagtttaacttctacacagaaaaagcaccttcataaaaaccaagaagcaagtgagccaaatacttgatttttactttatattgctgacagagacactgaagatgtaggcaaaacactcttaaatctctgacaccacccctccccatccagagagtgtctctctgccctggggaggagaaccagcaattgggaggcattgattcagtgctgcccttgttataccagaaagcaaaaccagaccaaacttacctgactcctgcccactgagtgagcatttaaatcagccttagccagaggggaatcactgatcctagcagtcagtaggaacttgagttcccccaagccttaccaccatgggctaaagtgctctggggcccaaaatgaatgcagaagtctaggccacaaggactgcaatatctaggtgagtcttagcacagaaccaggccaaaagccagtggaatggcggtgcatgcaacctactgagacattagccaggatggctgaggtagtgtggcatcacccatccccagccccaggttgtacagctcccagctccaaaagagaccccttccttccacttaaggagaggagatgtaacagtagggaggactttgtcttgcatcttggatactagctcagccacagcaggatagagcattggtcagagtcacgaggcctcctttccaggccctagctcctgggcgacatttctagacatatcttaggccagaagggaacctgctgccttgaaaggaaggacccagtcctgacaggatttattccctgtcaactcaagagcctttgggccctgaataaccagcagcaatacccagttactatatcaagggccttgggtgagcctctgagacttgctggcttcagatgaggctcagtacattcccagctgtggtggctaaaggatgagactcctgctagagaacggtagagggaaaagtaaaggggactttggcacctcagatactagctcggtctcagtggggtagagcaccaagtagacccctagggtcctcagttctaggacttggctcttggatgacatttctggaacagccctgggccagaggaggagttcattttcctgaagggtgagtcccagcccaggcagcatatgctacaagctaatggaagagcccttgggccttaagggctcatgagcagtaatctgacattactttctgtaggtctgcagtacttcacataggcctgaggtgcagtagccattgggtgaggctcctctacctttggaaaggggagggaagagtgggaaggattgtaccttggggtttgagttccagctcagccatagtgtaatggaacaccaggtagatgtctacagtttttgactctagtctttggctcctggacagcacacctctggacctgcctgaggcctaagggaactcactgccctgaagggaaggacataggcttggcctgccttgccacctcctaattgtagagccccagggctttgagcaaaccgaagtggtagccaggccttgggtgagacttaatgctgtgctggcttcaggtctgacccagcacagtcctaggggtggtggccccagctctagttggctcagaatagagagaaaaacttcatttgtttgggagaaactaaggaatgagaacaagaatctctgccttgtagtttggagaattcttctggatcttgtccaaaaccatcaaggctgtacctctatgagtctacaagaaccacagcattcagtaagggtctccgctaaagaagttccagcttagattataacatccaagttcctttcaaatatttggaaagccttccccagaaggatggatacaaaaaagcccagactgcaaagaataaaataaatacctaactcttcaatgcctagacacagacaaacatctgcaagtatcaagataacccaggaaaacatgacctccccaaataaactaaataagacaccagagaccaattctggagatacagagatatatgacctttcagacagggaattcaaaatggctgttttgaggaaactcaaattcaagataacacagagaaggaattcagaattctatcaggtaaatttaacaaagagattgaaatagttaaaaacaatcaagcagaaactctgaattgaaaatgcaattggcatactgaagaatgcatcagagccttttagtagcagaactgacaaagaaaaaaagaattactgcacttgaagacaggctatttaatagcagaattgatcaaacagaagaaagaattactgagcttgaaaacaggctatacacaaaggagacaaaagaataaaaaacaatgaagtatgcctccaggatttagaaaatagcctcaaaggggcaaacctaagagttattggccctaaagaggagatagagaaagagatggggatagaaagtttattcaaaggtataataacagaaattcccaaacctagagaaagatatcagtatccaagcccaaaaagtttatagaacactaaccaaatttaatccaaagaagactacacctcaaggcatttaataatccaattcccaaagatcaaggataaagaaagcatcctaaaagcagcaagcgagaataagcaaataacatataatggagctccaatatgtctggcagcagatttttcagtggaaactttacaggccaggagagtgttgcatggcatatttaaagtgctgaaggaaataaacttttaccctagaatagtacattcagcaaaattatccttcagtcatgaaggaggaataaatgctttctcagacaaaagctatgggattttatcaacacaggacctgtcctctataagaaatgctaaagggagtacttcagtcagaaagaaaatgacctttatgagcaataagaaatcatctgaatgtgcaaaactctctggtaatagtaagtacacagaaaaatacagagtattgtaacactgtaactttggtgtgtaaacttttatcctaaggagaaagaataaacaatgaaccaatcaaaaataatgactacaagaagttttcaagacaatacagtaagttataataacaaaaagctaaaaactgtggggatgaagttaaggcaaagtattttctttttccttgattgcttatttgtgcaaacaattttaagttgttatgagcttaaaataacgggtactaagatagcaagaagaggagactacaaaacaaccacacacaaagaaaggccagagtatgcccttcttatcagtaatgacatttaatataaatggactaaactctccaatcaaaagctgtaaactggctgaaggtattttaaaaaagaccccttgatctgttgcctataagaaacacactttatgtataaagtcacacatagactgaagaaaaagggatggaaaaagatattccatgccagtggaaaccaaaaatgagcaggagtagctatgcttagacaaaatggatttcaagacaaaattataagaagagacaaaggtcactatataaggaaaaaggaatcaattaagcaaaaggatataacagttttaagtatatattcatgcagcactggagcacccaggtatataaagcaaatattagagctaaagagagagagagagagactccagtaaaatagtagctgaagacgtcaatagctcaccttcagtattggacacatcttccacaaggaaatcaacaaatcaacactggagttaatctatactataaagcaaatggatctaataggtatttagagagcattttattcaaaggttacagaattcacattcttctcctcagcacatagatcattctcaaggatagaccatatttaaaaagtacaaaataagttttaaaacatttttaacaatttgaataatatcaagcatcttctctgaccagaatggaataaaactagaaatcaataacaagaggaattttggaaactacacatatacatgaaaaggaaacagtatgctcctcaatgatcagtgtgtcaatgaagaaatttcagaaggaaattgaagcatattatggaaacgcaacataccaaaacctatgtgatacagcaaaagcagtactaagagtgtagttgatagctataagtgcctacatcaaaaaagaaaaatttcaaataaacaacaatgcatcttaactagaaaagggggagcaaaccaaactcaaaattagtgaaagaaaagaaataataaagatcagagcagaaatcaatgaaactgacatgaagaaaacaataccaaagatcaatgaaacaaaaaagttgagttttttgaaaagttaaacaaaatagacaaatcttttgccagactaagaaacaaagagatgatccaaataaaatcagagatgaaaaaggagacactacatctggtatctcatctagtatctatactacatctagtatctcctactggctactaggagcaactatttgcctataaatcagaaaatgtagaagaaattgacaaatttgtagttacatgcaacctaccaagatggaatcatgaagaaatttaaagcctgaacagatgaataagaaataaggagattaaagctgtaagaaaaagtctctcagtaaagaaaagcctggaaacctgatggcttcactgctgaatttcaccaaacatttaaatcagaactaataccaatccttctcaaactattccaattaatagatgaggatggattacttcctaactcattctatgaggccagtattacccaatatcaaaaccaaacaaagacaccaaaagaaagaaaactacaagccaatatctgttaaatattgatgcaaaaatcctaaacaaaatattagcaaaccaaattcagcagtatattaaatgattattcatcatgaccaagtgagattaacctttgggatgcaaggacggttaacaaatgcaagtgaattaatgtaatacaaaatattgaccaaatggaggacaaaaaccatttgatcatttcaatcgatgttgaaaaagcatttgatgaaattcaccatttcttcatgataaaaacccttaaaaaactgggtatagtaggaacatacttcaatataataaaagttatatatgacagaccctcagtgggtatcatactgaatggggaaaaactgaaagcctatactcttagatctggaacacaacagggatgccactgtcatcactcttattcatcgtagtactggaagccctagctagagtagtcagacaagaaaaagaataaaaggcatccaaactggaaagggagaagtcaaattataattattttttttgcagatgattttatatttggaaaaaacctaaagattctactgaaaaaactattagaaccgatttcaaaattcaataaagttgcagcatacaaaatcaacatacaaaagtcagtagcatttctatatgctaaatgaacaatctgaaaaagaaaacaagaaagtaataccatttacagtaggtacaaatgaaactaaatgtttgggaattaacctaaccaaacaagtgaaagagctccacaataaaaactataaaacactgatgaaagaaattgaagaggacaccaaaaaatggaaagatattctgcatccatggattgaaataataaatattgttaaaatgtccatatttcccaaagcaatctgtggatttaatataatctctatcaaagtacaaatgacattcttcacagaaatagaaaaaaaaatcctgtaatttatatggaatcacaaaagtctcagaatagccaaagctatcctaagcaaaaagaacaaaaattggagaaatcacattacctgatttcaaattgtattccagagctatagtaaccaaagcagcatggtactggcataaaatcagacacacagaccaatggaacagaatagagaacccagaaacaaagccacacacccacagtgaactcatttttgacaaaggtgccaggaacatatactgaggaaaagacagtctcttcagtaaattgtgctgggaaaactggatagctgtatacagaagaagtaaactagacccccatctcttgccgtatacagaagtcaaaatggattaaagacttaaatctaagacctcaaactatgaaaccacttcaagaaaacattaggaaagctctccaaaacattgaactgggcaaagatttcttgagtattaccctacaagcacaagcaaccaaaacaaaaatggacaaatgggatcacatcaagttaaaaagcttctgtatggcaaaggaaacaatcaacaaaatgaagagacaacccacagaatgagagaaaatatttgcaaacaacccatctgacaagagattaataaccagaatatataaggagttcaaacaaccctataggaaacaatctaataatccagttaaaaaatagagaaaatatttgaaaagacatttctcaaaagaagacatacaaatgacaaaaacacatatgaaaagatgttcaacatcattgatcatcagaaaattgcagataaaaactgcagtgagatataatctcaccccagttaaaatggcttgtatccagaagacatgcaagaacaaatgcctggcaaggatgtggagaaaggggaaccctcatacactgttggtgggaatgtaaattagtacagccactgtggagaagggtttggaggttcctcaaaaatcaaaaatagaactaccataggatccagccatcccactcctggatatatacctaaaagaaagaaaattagtgtatcagtgaaatacttgcactcctctgtttgttgcagcactgtttacaatagccaagatttggaagcaacttaagtgttcatcaatagatgaataggttaaaaaaatgtgttacttatacacaacaagtactattcagccatagaaatgaattatgtcatcctttgcaacaacatgaatggaactggagttcctaatgtgaagtgaaataagccaggcacagaaagacatacattacatattctcactcatttgtgagatctaaaaatcaaaacaattgaacccatggaaatagatagtggaaggatggttaccagaggatgggaaaagagtgtaaaagtcgaaagaaatgaaaaatagaaatgaaaagatcagaaaattagacaatcaattcaagaagttcttcacataattttgaagaaaaaaatacagtgcaggaaatcctaatactatgttactatctcatgaaagtaaatctggaattaaagaacatgaatttctagattgtaagacatgagtttctagatagacctgtaactaggttcatcatgaaatttttgaggaacagagccaagatacataaaagttccctcagagggaaaaaacaatgtgcaaattatgaagactcagaatataattaggcttctcaataacctatgaaattccgcaaaatatttcaacctaaatacctatatatgaacaaactatcaattgtgtgtgaaggtacaataaagacattttacagagaaactagatatcgaaacttttacctctcatatgttttcaggaatctcctggaggaggtactctaccacagcaaagggtaaaccaagaagaaataatccactgggatctagaaagctgggagattcaattcaaggaatatatagggaaccctcaagaataggactgagggagatctcagaatggacatttatttaacagacctagagaacaaccagtccagtttggagataggtcaaggaagttgtatctccaagaagacaaacagaatgtttcatatctttaagcatattgagaagatatatacaactaggagagaatttgggcattaactcataataattatttactcaggccaatataatatagctgaagtgacattgttttgtttattttctctctctttttttttgaaatggggtcttgatctgtcacccagactggagtgcagtggtgcaatctcagctcactacaacctccgcctcccgggttcaagcaattctcgtacctcagcctccctgagtagctgggattacaggcgtctgccatcatgcccggctaatttttgaatttttagtagagatggggttttgccctgttggccaggctggtctcgaactcctgccctcaagtgatcagcccgcttcatcctcccaaagttctgggattacaggcatgagccaccacgcccggcccattgtttcatttctgagatcatgtcttaagtggccttaaatgctttcacactgttttgaaaccctcttcagcttccatgtgaaaaatcttaaactagtctattggagaatgggagaccacagaaggaagagacaagcactcctatctgaagccattctaatagtagccagctacgttagattgagcggctgattgcagatacatgaaagagcccagccaagacaaaaaagaaccgcacagctgaacccctcccagattgccaccttgcagaatgatgacctaaatcagggattggcagactttttctgcaaaggtcaagacagaaggctttatgggctaagaggcttaattgagaatattatataggtgcttatataatgagaaaaaagttaacaatttttattgaaattaaaagtataatggattacaatttttaatatagatctaatgaaaagaggagaattctctttggggtaatagcatctgcttgttatttaaagctagttatacctatcatgaaaattggtcacaaatgtttgttagttggttgttaatgctgatctgtaatgagagattctacatatttaatctttaaaatgtcttttcacacagacaagtatgctaaatatttatagtaataaatgaatatataattttgattgagtacagtcatcacttgggaggcatttatagaattctaggttctcttaatattttccttttagcatgtcattgcagtgcagattaattacttccagttgaaagttagatgaaagtttctcaaatgcataagtggatttggaaatacagaagcttcctttgcacttgcatccatgtctggaacttctggaactgtagtttgagttcataaatttgtgtggaatagaagtcttactttttttttaagctgttgttgcacaggaagtgtataaaggagctagactttgtgattcaaacaatgttgattatagttcaaatgactaccccatagtataagtcttgctgcagataagtgctattgtgcattgtaatttttaatttaatttattaagaaacattatctagcttgaaacaaaagctaatgtcttaagctattcattgtttggtaattatgattgagtggttcttcttattcagaaaaactttcagtcaaagccctgagctcaaaaacaatcacagcaactctttactactgctaagccattggactgctgtataggatggcaagtcaggatattgagcttcagtttcagacagaaattaatagaactgacaatggcctagtcagcacaaacaaaagaagttcactcttagcagtattcattcagtaatacatggtgaattcagatattttcttcaaaacacttcctgatgagtaactatgagttttaaataatttactttttcacaaattttagatatttgttcaagtaagccttctttcattccacacatatttttactattgtcaattgttaacacatcttagcagattccaagccaggttgtactgaattagtgtttctcaccttttttgaaaagtttcctacctatagttgttccatgcagactattcatagagcctaagtttgaataacttcaaacttggcattgattcctgaaataaataattcaacaaatcatctgactcatgaagagccaagaaaactactcaaaaatcatttactttgttttttaatttactattgattttgcaaccgatgccgtcaatctcatcaagcccctgttctcacaaaaagctattccaaacaagctcctttcttccccctcaggagaacatttacctggctgctttaattaagcacaacttttaaaactcaccattggtaaatggcatttctgacttgactaacaaatgatccactcggaaatttaattttagttgtagtgtgcatgtgtgtttgtgtgtgtgtgtgtgtgtgtgcacgtgtgtaagaaatctgttgtcttgaaggattttaaattttgtaatttttcgatgattgctctcctgttgagaatattgtgatgagtgcttactctggtaatattcacatttattatttcttttagcacagttacagtctcattgcataataaacacttttttgacatctaatccattatcaaaatatcacactccactctgccttaaaagtgcaacaaagtcgttttttcttgttttggcatgatagacatgcagtgaagttaaaaatgataataatgttacattatgacaacattcatggcactcaaatgccgccaaattattactgcatcactatagtttgtaatgcaccaaacagcactatgatgggatgagaatcatgtcataaaatattctctttttttcaacattaaaaaatgtaaaaagtattctaatctagtggattgtaccaaaacaggcaatggaccggatttggctcattggtagtagattgctgatcccaggtctacataaatggttgtattttaagccactaaagattaatgttgttgttacacagcaaaaagtaatatatttactatagatttactcaaatccataatctatctaaagagggaagatagggggactaaaaatatctatgtgttagattttgcagtgtttctaagaaataaggcaaattcttcattctccacactgaaaactcaaaaagtaatgcctgaaattgtaaaattgcaataagaatgttggagatattgagagaacatgaaaaagaaaaaaaaaagagcaaatgtaaaagaacagaaattataacaaactgtctctcagacgacagtgcaatcaagctagaactcagaattaagaaactcactcaaaactgctcacctacatggaaactgaacaacctgctcctgaaggactactgggtacataatgaaatgaaggtttcttttgggaagtgggaaactggtaaggatggaattcataggaatggttacacagggacgtcaccattattgataatattctacttcttaaactgaggggcaaatggtgtgctgtgcatggtattttatttatcttattttgtgtgttaaaatttttctttacatatattaacataaacaaattttaaggaattagagagttaaaattttattcaagagaatacaagtattgactcatttttatctgacttggaagtcaactctaacttactgccttccttcatttttttaaggcttattatcactttgagaaaagcatgctgctaatcatgtgaaaacatttgcagggatagaatgtaggatacatgaactcacactgagggagaaggaaatattttaatcccttcataagtagctgttagagtattcatgaaaatattttggtagcctttcttacagtgatttatattatgcttttaagctacatggtactgtatatctattaaaatttttagaggattaagactgtgagatttattgatagagtttacagaagggcttgtagctccttcctagtaaattaactttggccttgattgagaacaatacagaacaactttaaaattacgtgtgttgcaggaaaaaagttcattgtataccatcatgtaataccacattttggcccccattttccctctgtcttgagtgctcttgccctctctccccctcttttatcatgtaatgtattctaccatgttatgatgcagtaagaaagctcttaccagatgtggccccagtaagaaagctcttaccagatgtggcccttggtcttcgacttctcaggctccagaaccatgaggcaaaccatgaatcaattttctatataaattacccagtctgtgatatgttacagcagcagaaaatggactaagatatctatttagtaatacctatgaatggagacattatggttactagaaaattacatttctgattatacaggcttgtttcattttgggggttgcttgttacagacactaaaatgtcactcattttcctagtattttggttaaaaaaactgcatccaatacaaggagtatagttcattacccccaaatcactctacccatactactgaatattagtttttcttagtaagaatggaattttggacaatctaaaagactttctcgtaactttaaatgaaactgttctaaatatacattcttctcagcaccacactgcacttactccaaaattgaccacatagttggaagtaaagcactcctcggcaaatgcaaaagaacagaaataacaacaaactgtctctcagaccacagtgcaatcaaactagaactcaggattaagaaactcattcaaaaccggtcaactgcatggaaactgaacaacctgctcctgaatgaatactgggtaatgaaatgaaggcacaaataaagatgttctttgaaaccacgcgagaacaaaggcaccacattccagaatctctgggacacatttaaagcattgtgtagagggatatttatagcactaaatgcccacaagagaaagcagggaagatctaaaattgacaccctaacatcacaattaaaagaactagagaagcaagagcaaacacattcataagctagcagaaggcaagaaataactaagatcagagcaaaactgaaggagatagaaacacaaaaaacccttcaaaaaatcaatgcatccaggagcttgttttttgaaaagatcaacaaaattaatagaccactagcaagactaataaagaagaaaagagagaataatcaaatagatgcaataaaaaatgataaaggggataccaccaccgatcccacagaaatacaaactaccatcagaggatactataaacacctctatgcaaataaactagaaaatctagaagaaatggataaattcctggacacatacaccctcacaagactaaaccaggaagaagttgaatctctgagtagaccaataacaggctctgaaattgaggcaataataattaatagcttaccaaccaaaagaagtccaggaccagacagattcacagtcgaattctaccagaggtacaaggaggagctggtaccattccttctgaaactatccaaatcaatagaaaaagggaatcctgcctaactcattttatgaggccagcatcatcctcattccaaagcctggcagagacacaacaaaaaaaggaattttagaccaatatccctgatgaacatggatgcaaaagtcctcaataaaatactggcaaaccgaatccagcagcatatcaaaaagcttatccaccatgatcaagtgggcttgaaccctgggatgcaaggctggttcaacatatgcaaatcaataaacgtaatccagcatataaacagatccaaagacaaaaccacatgattatcttgatagatgcagaaaaggcctttgacaaaattcaacaacccttcatgctaaaaactctcaataaattaggtattgatgggacatatctcaaaataagagctatttatgacaaacccacagccaatatcatacggaatgggcaaaaactggaagcattccatttgaaaactggcacaagacagggatgccctctctcaccacttctattgaacatagtgttggaagttctggccggggcaatcaggcaggagaaagaaagggtattcaatcaggaaaagaggaagtcaaattatccctgtttgcagatgacatgattgtatatctaaaaaaccgcatcgtcttagccccaaatctccttaagctgataagcaacttcagcaaagtctcaggatacaaaatcaatgtgcaaaaatcacaagcactcttatacaccaataacagacaaacagagagccaaatcatgagtgaactcccattcacaattgcttcaaagagaataaaatacctaggaatccaacttacaagggatgtgaaggacctcttcaaggagaactacaaaccactgctcaacgaaataaaaggatacaaacaaatggaacaacattccatgctcatggataggaataatcaatatcgtgaaaatggccatactgcccaaggtaatttatagattcaatgccatctccatcaagctatcaatgactttcttcacagaattggaaggaactactttaaagttcatatggaaccaaaaaagagcccgcattgccaagtcaatcctaagccaaaagagcaaagctggaggcatcacactacctgacttcaagctatactccaaggctgcaataaccaaaacagcatggtactgttaccaaaacagagatatagaccaatggaacagaacggagccctcagaaataatgccgcatatctacaaccatctgatctttgacaaacctgacaaagacaagaaatggggaaaggattcccagtttaacaagtggtgctgggaaaactggctagccatatgtagaaagctgaaactggatcccttccttacaccttatacaaaaattaattcaaggtggattaaagacttaaatgttagacctaaaaccataaaaaccctagaagaaaacctaggcaataccattcaggacataggcatgggcaaggacttcatatttaaaacaccgaaagcaatggcaacaaaagccaaaattgacagatgggatctaattaaactaaagagcttctgcacagcaaaagaaactaccatcagagtgaacaggcaacctacagaatgggaggaaatttttgcaatctattcatctgacaaagggctaatatccagaatctacaaagaacttcaacaaatttacaagagaaaatcaaacaaccccatcaaaaagtgggcaaagtatatgaagagacagttctcaaaataaggcatttatgcagccaacagacgcatgaaaaaatgctcatcatcactggccattagagaaatgccaatcaaaaccacaatgagataccatctcacaccatttagaatgacattcattaaaatatcgggaaacaacaggtgctggagaggatgtggagaaataggaacacttttacactgttggtgggactgtaaattagttcaaccatcgtggaagacagtatggcgattcctcgaggatctagaactagaaatagcatttgacccagccatcccattactgggtatatacctaaaggattgtaaatcatgctgctataaagacacatgcacatgtatgtttttggtggcactattcacaatagcaaagacttggaaccaacccaaatgtccatcaatgatagacacgattaagaaaatgtgacacatgtacaccatggaatactatgcagccataaaaaaggaagagttcatgtcctttgtagggacatggatgaagctggtaaccatcattctgagcaaactatcacaaggacagaaaaccaaacacctgcatgttctcactcataggtaggaattgaacaatgagaacatttggacacatgatggggatcatcacacactggggcctgttgtggggtagggggaagggggaaggatagcattaggagatatacctaatgtaaatgacgagttaatgggtgcagcacaccaacatggcacatgtatacatatgtaacaaacctgcacgttgtgcacctgtaccctagaacttaaagtataataaaaatatataaaaaaaataaatgaaactgttctgtttgtatgttgggattacaaacacagatacaaatttctggcatatataccctagatcagagttgttggctgtggacataggatcatactatgtgagtaatactttgcccatataggaaggaaatgaaaatgtgtctatccttttctttgtttagaccaatgtttaagagttagcaacttttgaagatgttgtgctaatgagctagcctatttacttttgatatatcatatggggtgaggcaaggatgactatgtatgagattaataaagactgtgtttgttgactcatgtaaagactatataaatggcaagaagagcaaccaatctccatgctattattggtagctctttacatcttgggttgctgacatcggccttaagccttcagggtccccactacctggtcccagcctttctttctttccacttttcccaagagagccttcatctgtagccagaagcctgaaacatatactcaggttctatttttgcgctcttatacccaatgtcatataaactattattcctaaataacattcaacatgagctacttacacagatccctcagtcttcatcttctttccacacatgaaacacctattaaacctcaagtcagagctcacctatttttttaaggttttctctgaccattgtagacattgtgatatctccttccttataactcaaactagtattaccaccactcattaaccacaacgtcctttaagatctcttttagtgtatggttatttcagtttctgtgcatttatattttattttcacaaataaattagaaactcatcaagagatagacaaatatagctttcagtatttgggactattttttacacaaagtaggtatttaggacatatttgacaaatgaatgtatgaacagagtttgctaccaaccacaaactagaacccagcataacatgtgtatctcatctttgcacctctagtttatcactcattttctaaggtgcatttctacaaccacatgtaacttttagagtaatacataattagataatatgcatgtattttgtgtagaaacaaaaaataagtaaaacacacaatttccccagaaaattaaacaaccacatagtactatggtttacaacccacagaccagaattcagttagttggtgatacttgttttctgtaaataactgagctatgtttacagtccttaacaaaattgccctgataaagggcagacaaccacaggcatttcacttgttcatgatcctgtgattactgaaatgtatagtagatttaatggatgctaaagcataactatacttttaagcaatagagagaaattataacatcttatgtaaaatatcatataagtttttagccctgaatgacattcaacatgacctatttaatcataacagtataaaaactgattccagtcatttatttttaaaaaatagtgtatggaactttctccacatttgaacactagttagataatcatttggataggatgtttctgcatatatttttagataaaaacattccaatatgactgatgtattttcacaaatacagcataacatatgtgcaattgagtacctttcattccaaactattcaccttaggatagtgtttctcaactggaagccatctagtgggtagatactcggtatgctgcttacacacaggatgctcccttacagcaaaggattgtcagtagttccaaggttgagaaacccttccttaaagaatataccatgttcagtggtggtgtgatcaccaaaatattttggaaaatacttttcagaatttcctgtttgaatgtacttattggtggcaactcttcattccttgcaagctatgttttattttagattaattctcatgactcccaggaatgatatatttaatttatggaaccaacaaaacatgcaagcagatattcacataccacttgcatacatgcaaacaaaatttattaatcaattcttactaattcagaattgggcctgattagaaagtagaaggcttaaactttacttttatataacattcaaaggaataatttatacacgagcagtttttaaggatgagcttcacaaccttgactgtcagttaactcccaactggggaggatagaatcaagtgaaattttgtactgtaaatggtcttttgccagctcaaaaacaaggaatggtagagcctcaaaaatttcaactgagaaggtattaataatataaacactcagctccctcaaaagtgttaactgaataactttcactaactcttcatgtttttttggttatagcccatttatttaaattgatgcttttgcttttagttaatatgtttcttatgacagttttttatctgcagttgtaaaatttcaaaagccctgaaaactaaggatttttgtaactcacctgttagcaaaacctgacttgaactaatgtgaagctatttatacttttaattgactcatataatgtgaatattcatattcttcactacagaagtattaacatgttatatttcagagagcttagtatgtatgtaatatttttacctttctaaatttgaataacttcaaattctaaatttgcaagtgtgaagtctataagaattataaaagcagatgctgaatagttttattcttatgtttttcttttataaattgctgtagtttttcaactttaatcttttgaaataattatggaaacaactttgtactctatcaatggaaccaacatttaatgtactcagtgattgaaaataaaatagtaaaatttttcaaagactttcagaattttcagttaattttataaggaagggaataaaaaataagtataccaatattaaagtgatagatgatatgatcaagcaaatgacaagagaaaatgtgtattgccaatatttttctaaattaaatgctcaacatcacttggtaatcttttaagagtacagggtaaaatgagatgtcattctccccaagtaagcaaagattctaaaaaccgatgaaaataaatgttatcaaggatgcaagaaactagccattcctatgggcttcttataagaagaaatttgtacaaaatgtcaaaagatacattgagtttaaatcctttggccaaaaatgattccactttttgaattggtccaaagtaaatatctgcaatgtagcacaaagatacatatgtggatgtttgtcactgctgtattttatttaaagtgaccaaaatacccatgattaaaaattggtaaaataaattattatgcaaccctataatataatggaaatcatattatagaagaatatgtaatgtctccagaaaatgtccaagatataagtaaaaaatgctagagtttagaaaatagtatgtacagtttatcccatcttctgtatatccaagtatatatatgtgtgtctttctttgtgtttgtatttttccacgtttccattttttacagtaaatagatttgaaatagagaatcctttatattattgtatattttctgagttacatataaatatctaaaattaattggggaaaactaagcaaagtcatacatacagtccacaaagtgaagaacctccaagaatcaaaactgaagcaaatattctgagaaactcaagccattttccaattgattgccttgatgtccaataaaaaagggtggtacctatagatgggaatgaaaagattttgcttcgtggcattcattccatttcatgatacactattgtagcagaaaatatcatgacttcctgagaagtgtagttttacagaattttagtttgctttctgtatttgcaattctgaaatctcttagctacctgattactatttcaataaacggagagtaccatttccctccctagatctctcatttcaaatactagcacactgggtggaatttttacctcttacttatggtgtccagctcacaacatcttaacctggcaagaggaccaaactagctgtaaatcttaccactcagaccacacttgattattgtgtgatggcaaaattaaacgtgaataaaacaggtagagcattagagtgttcttggaagaataaacacaagttggaagtcttatgtggatagtgcaaaatacaggaaggcaatgaatcatgtaaacatcaaatgaaaggttggtagggaagccattggaatctgtcaggcactccctgcaataaatggcatattccgttcctttcctttcattcagtttaggaaagggagttctgtgaactctctaacagatcgcaaaagattctgtaagttcttattcctgtgtaaaggtacactttgaatagaatgagctgaaacccgctgaagaggatgtttagtttatatgaaatggacacagatatgtcatagtgctcacctccctgactgttttgccttctcccacaaacaggaaactgttaaggcagcaataatagaagagcagaaacgaagtgaaaaggctgtggaagaggcagtgaaaagaacaagagatgaattgatagagtatataaaagaacagaaaagggtaagtatctcctgaagagttttaatttgtgcttcaataaactgaatcagtgacttccatacaataacatgaaattgtaaaatatttaaaatgtcctgtgtcatctaacttacggatcttcatctaaggatattttctgatataattatgtattctgatagttatgtctataaacataaatcccatctgtcagcaaaaacaacagtgaataatttgttggtagactcctagaaataacctatatcatttccaatttagctttacttacaaagataatagacagttctacatttttagtcttttgccatacatttgttaatttcttataatattcatagacatgtgtatgcatcatttaagctttctgactgtattaacaccactgtagttctaatggacataattacagttagcaaattcaggctcttctgccatagtgccatttcaaaaccataactcagaatatgcttgtaagaatttaggatgcatattaaagctttgaaaaaaatagcattttcatacaatgtggttttattaatgttagtctgaagagtagctgaaactaatggatctaacttgatttgttgtcgtttcaataaatcttcagtcctctaagcaatacacaaaataagaaactctttaagattagatgtttactgtaatcttctctgtaataaatatatataataaaatatataataaaatttttcacatgcagtgttttaggatgtttatatgtttagtatatgttacatattatataaatatatttatttgtgcaaatatataatatattgcaaacatatattgcattacataatgtaacaaaacacacataaacagtgtgtatgaggaaatttgacacaatagctaaacttaattggtggtcaaaatggcaaaataaatagaaaatatacgataagatattatcctgcagttggcagttcaagaagtgcactaaaagctcatgacactactttagtcctatactttttttttttgtttttttttgagacagaggcttgctctgttgcccaggctggagtgcagtggcgcgatctccgctcactgtaacctctgcctcccggattcaagcaattcttctgccccagcctcctgagtagctgaaattacaggcgcctgccaccatgcccagctaatttttttattttttatttttagtagagatggggtttcaccatgttgtccaggctggtcttgaactcctgacctcaagtgatccacccacctcagcctcccaaagtgccaggaatacaggcatgagccaccgtgcccagccatccagtgctgttaacttgaagtcaaatttggtatgatacaaagaaaatccccatctcttgatggctacagttaggtttcaacagaggagaatttgtcaccagagtaaaaacttcctaagtagtctttccagataaattaaccactcacagaaacattttatattggattaaatctttgtacagtttacctcagagtgtttttaaaagcattttcactcaaacaaattcctgatagatgcctaaccttctaaggggaaaattctgggccaaagagtcaattggcttttcaaaggagtattatgttctcagaaaactcctatttccatatgtacctacaaagagtttattttaaataatcttgttcaaaagtaatcatgcagcaaaggaattataggtacattttatatgcatacagggattgcaattgtgaaagaacttaagtatcaaataaattcaaagacttcttgtgggtatttgcttttttatcatctctttttaaaattgtttattttatgttagtaagaacacttaacatgagttcttcctcttaaaattttaagtctataatactttatcattgactatagatgtagaatgttgtacagcagagctttagaacgtattcatcttgcttgaccgaaactttatgccattgtttgggtatttcctgtttctctctaacccaatcccctggtatccaccagtccactctgattctatgaatgtgactagtttagatactctgtataagtgaaaccatgcagtatgtgtctttctgtgactggcttatttcacttagcgtaatgccctcaaggatcatccatgctgttctgtattgcagaatttccttcatttttaaagctgaatggtattttgttgtacatatataccacattttttatccattcctctgtcaatggatatttagttatttccacatttttagtgtctagtcttaatagtatatggccaatctttatttgagctctgaatctgaatgagaaattatataacaaagcaaactcattcataagattattttagactaacatttctttggttgagatggatgatttttcttaaaagaattttaaagataatgttactttttttgtcaaagggagttatgtggctaccataagaagtgcctataataagaataagaaatgcctttttaagagatatctgttccccacatgaagcaaattaactttgaaaagagctgacaatgaactctggcatttagtctgtgtgttcttgcaaatcatactaaaggcctagtattcacttgtattagtcagtaaatcagttaccacatgtagagacattattaaaataacagccaagaaaccgtgacattagctttcatttgcactgaagttctacttctctttgcttgtttccttatatattaaggagaataaatctaatacctaccttgcagagttgttatgaattaatacatgtaataaaatagcagctacagtaaggactcaataaatatgtgttatgcttatcatctttaccacattatttacagaaagtagaaataactagcagcattattgttgctaattaaaaaatgtgctctttagaatagtgtttggtgttctatttcctctgaatttaaagtgtgaattctaaaattttatttctcttctgttactaattcacagaagattaaaactgatttaatcagtacacttgtaggaaatttattacttccactttgggattttaaacttttattaataatacatgctgtggcatatttttaatatttgaatgtttgtatctttccaaacagaaaagctataaaaaagtaaataaatgatctgaaatggaactaattactaattactagacctctttattatgtaaattttaaaaaattgagattctctatattcttattttccaaaaatgtatttcagtattttgagttaatttttatgaatatcttggggtttggaaaattttcatacacaaaaaagatatctcagagcttataaactaatacttaggaaaaacaaaagttttttagcaaattcataatcttcttgtctgtttccaaaagactgaattagggcaactcacatctacttcttcctttggaagatggatttctatttacatcagagaacacatttccagaataaaaattttcctttcccttctccaggtttttttttttaaactaaagagtcaacttgagattttcaacattagacaacttaaaagcccgatagaccttgtttccaactgagcttgaatttcagtttgtgaagtaatcttctgttcttgaagtttttgaaaatctttgaaggaagaagtctacttgtattaggtcctaccttttttgtcctttgtcctagtagtctttcattagacatcatcatacttttaccaaattcattaaaagtttgaaatgaatacttttcccctacatcttttttttagtcttttgcttttaaaagacagaaaaacacagaattaaaaattcaaaatgcttaatttttgaaataccttatggattatctaacaatataaaacacaatggatttacaaattgctatatgaggttacatagctctttctgtgtatctgaaattaagtacttaatcagttatccattcctgttaagtagtaaaattatactcagaattatactagaattaaagttagaattctgagaaaattttaattttaaatgctatttaccaatttttatgtgtgaaatcaatagagatgtcactaaactttaaaaatacctagtattcgtctggtctaaacatcttaggacaaaggggctacctgtacatgtactaattaagtaaattataatttacattcaaattacatcctaaattatttactaagtcagatacatagtacttgtaatattagtccgagtcataatcataaccaaaaattactatgtaatgaaaatatccaaataaggagagcttttaaaatgatcaaccagaaagataatttaaatcaatgatgaattagttttagtaataaaaatgcctttttataagaattctacctcataatctttttagaaatttctctgtaaaatctatcatgctaatcctgaggaaaaaaaaggatccttacattgaatttacaactttactgtggaatcaaaaaggtaatctgtagccttaacactcataaattttccattgaacttggcagaaattatctaattttaatggatttagacatttccaatataacttatataatagagaagaaaaggcaaacaggaaaacctaaaaagatttaaaaatatatttaatctttctgtggatcagcaaggtacctgcaagtacagtgatttgcattgaaagaccatattgtattttattaaaatgtaaattttggtttcagactctcttcaatcactgtaaattctatagcagaagttgcaaactgcaactcatgggtcaaatccggcctgctgcctgcttttataaataaagtttaattgaaacatacattcacatccattcatttttgtattgtccactaactggtgtcatgcttcaatagcagagttgagtaaagagagaccattgggacatacaacccaaaatatttactatctggttctttaaagaagaatgtttaccaactcctgttctaaatcataaaaattatcttgcggggaaagtttcttcttttcagccctttaaaatttttattcgcttcttatgcctcagggtaactagacaattgaagtctcttaggtgctattctggagaagatttctctctatgtattaattgccagataagatattataatacatcatatctgatcattagtgccataaattttattttataaatggagatggcagaaaaatgagatgggaaagaatacatccctgacacttccctagggaggaataatttgtggtttataatgaccgacagcccttggattagaacgaagagttccaacccatcccacaagttaagactgttacacatgagtttgctatgagggaggaagtgtgaataacattcagcaagcaacaactactcacagccaagcagtgattcctaaaaaataaaatctcatccaaatgtaataaaatactatttttcctcttaagaaacaaaattattgcctgtgttttctaaatcacctccaggaaaataaccttcactttagagtatccttttaatttaggtttttagagaagagtaagaagcaattttctttacttcaaaggttttgtggtcaaggcattgtcagaattttttaaatataaaagggctcttttaatccagttttgctgcaatattcttggatgtttgcatctccaactattaaaagataatatttagacaaaatgaactttccttatgttctgaccagttacacagttacttgaataaaccattatttcaatataagttatttaatatttcatggtcccttacttttctcttcttagaaatatagaagtttgactagctgatctctaatgactcttaaagtcctaaaattctgttaagactatgagtaacattttccttgacagttgataaaccccttgagagatttttaattcttgatataaatcagttgcatcatagtagttacattgtatggtatttataaattagtgtaggaaaatggcgctttcctgacatttcccatcttcctgcccctttctcatcctaattactcttgcttctatccaatctggaggaggctgtgtagttgtatgtgcaagaagtagctcattaacaattcagcatctgtggtctaaagcatctgcccttgtaacttttgatttgggtctcatatttgaaaatgcttttatgtaaccaacacatattaaaaagcatactatacccttacattcattattgcctgttttcggttgtacctcattttttgatgccaaagggaatttagccttctctacataagctatattgtaatttaaatcatcagaagtttaccttccaaatttgtataattatatccatttcaggtggcacaataaacaaatggaaaaatatttggatttagaaaaataaccagtactaaccatcttgccaaatgatgtttcaactaggtcacaaatttatccttcttcttaaattaaaagcttaggaaatttgatgtgaaagagaggttagtgaaggcaatgaagtaaacagattttaaaggttttatagttgtttaaggttaatataattatgattttaaaacttattcactatttctctatcttaaactctttgacagtttatttcacaaattatactttaaaatcaaatttattgctatctcccactttatattttatcagtcttcttgatggtctgtcttgttttgctcttttcacttgcataagaataatcttgaaaaaacttactgacatgtggacaatcacacactttggtgagatgaccctatttgtcatttccatttcaacagtgtggtaattgagatgatgttaaagataaagcccaatgcttagattatatcccattattcctgtagcaaggaatataaaatacgttttaacttaaaatcaaaatgtaaatttatgtatgtacacataaaaactagtttggtgtagcagttaatgcggtatttttcattggtttttgggtggattctaatcgaagtacagtgagcataaagactttggaggcatctagtatatgaaaatgtttatctctttttatgtaatgattcaaaattgttcatctaagtaatcacttcttgaattactataatgacaactaactttattctttggtaaaatgatttaactttaaaaaacatatattcactgatgcaggagaatcacttgaacccaggtagatcaaaaaagttgtgcgagaccagaagcaccatgtcttttaaagcttaaagccttattttggaaggaaagtataagaacatactccttaacgaattaagtgaggtcaaaataatagcttcaagcaataatagacaccattggcacatgacagtgcttgaataaagaccaaatgcattatggtgacaacaattgacaacagaattccagaagatcacttaagcctatgatgatcaggatggacttttggtttctgtcaaatgaaaactaaaatgtggactaggctatataataaaaagaggaaaaagagtctgcgagaagccaaaggatttggtttcttaaaagaataagcaaatttatatataaaaatttttgtaaagaagtctattttctagattcttgatataccttttggatgcaattctagaatatcttggctcataaagctcagattattgggggcaatagacatggagggaatttttttggcttattatattgatatgcccttcagccatccttagaagtcaaaaattttgtgtgtgtgtgtgtgtgtgtgtgtgtgtgtgtgtgaaggtgtaggtgtatgtatgtgtgtatatatcaaaatgtgtgtgtgcgtgtatgaaggtgttggggtgtgtgtgtgtgtgtgtgtctgtttgaaggacctctatttgtgagccgtttattaagggaccacaattgccttcactgttctcactccagcccatgctattaaactgtttagaaggaaatggagaatgaagtggtattacaaattgccagcatcttaatctgtctatatctatatatttacacagcatgcatctgtgtatacttttcactatcccatcttaaactgcatatggagaagcttcagtataaatgtttttttttcattctataaagaaatgttatgaatacccttaatagttggagcactgtgcttaggctacaaggacaaataaaataaccaataaagagagccttatcctagtattcttaataatgatacatatttgtttagcaactgaaatttataaagatttttttatatgttatttgactcttataatctataatcacttgcatgtttattattcttttgtaaaccagaaaatcagatggtagaaattatggttctgagattacatctaataatggcatagctaaaatttgatccagtgctttttctactatatcacaccagtggcccttgtcaacttcctgtatactagcaatttcactttactatctaggatgaagccaatatctgaagaaaattattaaagcccgcagtagttagaaccagtgaagagttacagctgtaacatgaacagctaagagaactagaagggcaggaggtactcagtaatatacaaaaggactggccaagagaacagcccacatgtcaccactatattttattatatactttaactataaaactatgttgtttttgtttcttatttaggaaaagatgatgatagtttcatggaaatcattgttcagagtgaattattaaagatataaccttgaaaaagagtttcaaagatgtgaacttgttcaactaagaaaaagttgcttgctgtaaaaattcagcaatataggctcccagaaaacagtaccacagttatcacctcaaaactaaataaatacctagaaatactcaacttaaatggaaatttaagttgtttaagtaaaatgttctgtattagaaaaaatatataaaagaaccaccatttattgggtcccaagtttgtccaacatacaataatgggtgctttatatttactgtctcaatcctcacaacaaccctaaaataatacctcattttacagataaggaaaattgagagtcagtgatattagataactacccaaaatcagtacgagggtcaagattttaacttggttctgtttgactgcaaactatatggtgagattgtaggatctaccttggtaaatttttaagactgattgaataatttacacattatttttcatataatattctaggaattattactttttccactaacaggaattagtatacctttctgtttttacaggctccatctaatttgtgccttttcagtaagacccagataaattgggaagaaaagtagaactttggtcacatgtgtatatatgtacactgaacacaaaagcagctaagaaaatgctgtttgtggattttaccttagagggacagaacttacatgcatggaatatgccccaacatgtaaggattttcaaaaagtgctaaaacaagaaaacttaataaacatacactacctggctgtctaacatcaatatattcccattgccaatatttaaacctaaccttcaaaatacattcttcttccatacttacatatagtaacagtaatacaactaaaataataataaaatactgaaggtatctcttataaaaacaaaaatgtgctcactcattgtctacaaagaggatgacctgaaatattctgtggcacccaaccacaagacaagtattgctgagagcgtgattggtctgatcattcaacttctgctgtcacaatcatcttgaatctctgtccatgtatatgagagtcatttgatatggctttctacttgagcatgcccaatttaataggttggaggattagctaaaacaagttcattttaggcagatcaggtcacatttgttttttcacagccaaatatacaatgttgaataacacttagcaatgagctcagtgctgcttttcaaagggataagatttccctgcctgatgactttgttccaaaaccttagagatttctgctgggattcctctattagaacttttcacaggctccacatagcatctcagtaaactgctaacggttctaacacccattgaatctattggtcgttaattagggccaggtagatgtgctatagtatggactaacaaggaagcctcctttttttctgggacctactcacaactagaggctttcaggtcacttcgtaaataggttaaagcaggattcccaaactaatgtataaataccacaaagagttccacctagcaatgtgtctctttcttagtagcaggaggtacaaggtgcattaagttgcctttaactttgtaaagcctatcctggtatatgcaagatcactggacctccagaaattttactgaggtatagttcttatattttcatgtgctatatcttacaccttactggattcataggtatactttcacttattacttcctgctttctaggttctggacacatatgtcatcaatgtagttgtcatacgtgatggtgagacactaatgatctttgtgaaatatattgtagtacagagccaaataatttatataaccctaagatgaaatggtttactattgtacctgtcatataaacacagctgttataggtgttctctgtgtattgagatacagggaaaaagcatttgccagatgaatagttgtatacctggtcctaagagctctagatgtacatttttaaatgcacatctacaacagcagctgcatttgaaatcactgtctgattaggtctcttataaatcacttcctccaatgtctactgcatactctggagataactatattatgtgtttaaggcccagttgggctggatatgagacagattcagatggaaacttcattcaccatttgattctgataagcatccattctgaccagtagtacaacgtggtcttctaggtcttcagttttagtgttggttcagagttactatacaatgatacacaaaagacctgatatttccctttctccagtatagctaccttgatgaggaaggccaaactgaggatttacagtctctatctgtgatattattgcgatagacgttttcaaggatgggcaatctcctcttcactcaaaaaaccgtgggcatgtgaattgactcaggactggacattggggaagacattacaaatttttgttgtagtaactcatgtcagacctttgttcattaagtctggatatttttataattttaagttggacttttttggatgcctatcagttttgttcatatgattcatctgatcaagtacccaaagctgatgtccctgcaggtcagagcattctgattacaactcaaccatgctagcagtaacagtaaccatttcctcctgcttcttgtaattaggtgtatctacttgagttttgctacctcagcgtcccataacattggaagccacgtagcccaccagcattcgtagcctacagaaggcagacactgttgttcacagacactgacttttacctttcgaggagcaatgttacagagcaattggtggccttgattattgcttgaattgagaatttagcatcgtgagactttaattatctttttgaagctgttgtgtgaaattaggatcaactaattttgtttttgaattcctcatgctcttcatatttttccatgtccatagcccctggatctggtaatagaagtatccaaatgttgggccactgaaagtcttgccttcagtggtcactttatttcaagtggctatagttaataatttgttagtttgctgctgcacactatgaactaccagattttacatttttttaaagaataccagctgaatctttacagccatcgacccttacagaaccaggtaactaaaatctttccgattttcctgaggttatattgtcttcaaccacttctagaaccaatttacatatcaaccagggttcttcttttaaataacagaagctgctttcatctgactaagcagcagaggagtttattaaaacgatattaggtaagcagccaagttgctagagggctggaaaaccaaggttaagcttctatgaacaatagcaaaaactacactgcaaaactggctaaagataaaccactctttgctgcacattcccatcaagcactaggataaactattgcatagttcaatcatttccatcccccaaatttggatacttctattatcatcgtcacgagcaaaatagatgctatacagagacctctaattcctcacttatgaatcaaagtctcgcacatttgactctggttagtggagccataggagcagagcaggctagataactgagttttcttgggttttatgcaggggaatcatacctcataaggctggaaattttttaaacatagggaggatatcaaaaatcagaaaacattacaaatggccactacattctttagtaaagtctcccaagttgctgtggttactgaagaaatatttttccagctttttagtcttttggctaattctaaaactgatcctttgaagttaaactaggtgggtttcattctttctagaacagaacattagcaattgctaggttcatcattttgtagaaagtttgcagcttggccaccataatattctttttcaagtaatctgagattttctacagttaatgcctaagttatacaacactgttcaaaggatatgcaatactttggatagattaggttctgggttctatgtagttgtactaaaaatagttcttaaggtatatatatatatgtatatatgtagatataaggtatatatacacacatatataaggtatatatatacatatatatatacatatatatatatatatatgtaggattttttgtaaattttagtgattaaacttatcattgtgttaatcaacagtgtttccccctgattactcagggatatttcatatatgttagttatagtacttttttcatagaatgatggccaccaagtttactaaaaaaagagcttaaatttctttctactaaattcatctagatgagatttccattgtttcttgagtccttggcatcatctgttctctgtatttatgtgtccctctaatcaattaatctgtttcttctctccttctccccattttcttgctattgaacctgttatccatggcctctgctatttttcaactctgattgtaagtataaaactgaagaaaataatgagaaactagacagcagagtactgtatcaaattaagtcacacatgttaagcttgaacaaggagaaatttccatcttaactttgtaataagtatacaggttttttggtatctgttttcacaggttcttatcacatctttgatgttctggttgttagagaaggttgtggctcgggacattatactactaaattgcaaagttagattccaccaacccatttgaatcttttccagatgactttttttccaatgtggatgattttatgaacatctgatttgaagtaaaatattccaggataagctgtatatccagcagcgtacattgagattgagtcataaaatagtcccactattcttttcactatggttttttattaatttttgcatgtataatgtgattaataccttgtactaggagcatattaatcatatcttctttgccattttacaaaaatttaaatgtatactttttattcatctgtggggatatatgacatttaaaataactttatggcttagtatttcctttgtagtttagagtacttattcgtttaagctttagtgtgactataatgtattcaaccctttgcttttgtcctcaatatttactccattcctgtggttcacatttccctttccttatgtatcatgtgttgaaaatgaaaatatcttgtctggggtggagcttagccatggaactaaacaaacatgccctctccttctgctcttagttggttttacaggttaagttacttaagaatcctgttaagaacaacaagaacaactttacatatacctttctgcatcattatataatcatagttagtaaaaatctctttcacttcctccaccagtgtacaatgtgattcattcactccttttatatttatgactcacacatcagtagagaggttattgaaaatagcatacatattcaaaaatgaaagcccttgaatttagtgaaagaaattaagccacttgaacagaatttccagtactcaaaaggaaactgtgatgggcacagaaaactgtgaacaaggcatgttcttctcatgtcaagagcagagtgcaagagagaaagcccaaacaggtaaacattgcaagcttctgattatgccttatctgctgatatctccaaagcaagttatatggtcaagtccaaggtcaagaagcagggacgtacattccatataccatgaagccaaagcatgtcacacagtcaaactcaacatcaataggtgaaaaagcctatttctcccacagaggtgaggaaaaagaatggctaaatatttgatcaataattatttaatctaccataccacccagtataaattagctatcttctctcctaccaaccttactttatagtatcactactctattttttcttcttagtgcataaaactctttgaaattatgttcatgtttttatcattcactattcattcagtgaacaaataccatcaaatacctaatatatgctaggtagcactcttaagtgctagggatatatcagtaaataaaacagacaaaaattcttgttaattatcttttccccctactataaaatataagctctaaaagagaaaagacctcatttgttttgttcactgctgtattctcagtatctagaataagcctgaaacataacagatgtttaatgaaatgttgcttaatgaaggaatgccattaaacatttatctaatctaactctgtttgttcaaattccttgctcactaagcagctttctgattgtgatttgtttctagcataggggaagcttttatggtcagttttatgaacttgagttatttcaagtcttctcttaagaaaaagatctatgcctggtattttgataaatctgtacctgcatagctgaaaaatcaatccttgaatgtagtaaattcacaaacgtaaaaccaccctgagcctgagcaacttctgttggttaagtagtatacatttaattcccttctaagcagatacagttattaacagtaatgcaaagagttttcacttggaatatatggcacctcacttttattattattattattatactttaagttctggggtacatgtgcagaatgtgcaggtttgtttcataggtatacatgtgccatagtggtttgctgcacccatcaacctgtcatctatattaggtatttctcctaatgctatccttcccctaccccccactcccttacaggcccagatgtatgatgttcccctccctgtgtccatgtgttctcattgttcaactcccacttatgagtgagaacatgcagtatttggttttctgttcttgtgagaataatggtttccagcttcatccatgtccctgcaaaggacatgaactcatccttttttatggttgcatagtattccatggtgtatatgtgccacattttctttatccagtctatcaatgatgggcatttgggttggttccaagtctttgctattgtgaatagtgctgcagtcaacatatgtgtgcatgtgtctttatagtagaatgatttataatcctttgggtatatacccagtaatgggattgctgggtcaaatgctatctttagttctagattcttgaggaatcgccacactgtcttccacaatggttgaactaatttatactaccaccaacagtgtaaaagcgttcctgtttctccacatcctctccagcatctgttgtttcctgactttttaatgatcgccattctaactggcatgagatggtatctcattgtggttttgatttccatttctctaatgaccagtgatgatgagcttttttccatatatttgttgactacataaatgtcttcttttgagaagtgtctgttcgtatccttcgcccactttttgatggggttttttttttttcttgtaaatttgtttaagttctttgtagattctggatattagccctttgtcagatggatagattgcaaaaattttctcccattctgtaggttgcctgttcattctgatgatagtttcttttgctgtgcagaagctctttagtttaattagatcccatttgtcaatttttgcttttgttgccattgcttttagtgttttagtcatgaagtctttgtccatgcctatgtcctgaatggtattgcctaggttttcttctaggggcacctcatttttcattgaggatcctgcttactttagatacatcatcttctttgcttcaaggcttctgccaaaaataaatagtttaatgataagatatgagtcatttctcactaggctcatacatagcaccacagaaggtattggcaaatagctaaataaatagataccgttaccaagttttgagtctaatgaaaatttatctacctattaactttggtcagtttagctatttcaagaactatgtcttagagtatgtatttactgtataaaaccaagtaaaaacttaaaagattctcagaatagatgtattccatagatatttgaactgcattatcaacagtcagcacttggaatgttccctgccctccccctattatctctgaagccataattttatttttatactcaatctgttagagtctgataagtgtatgatctggcaaatctttcatttcaaatgaaacaagtcatagaaattctcatatatacttcaggttcttcaatttttttaaatgtgtaaggctattagatgccctttatatagtcattcaagagttaccaccatttgctgaagaatacactattatttaactatagtggttcatagtaaaatacaagtgattataaattgttttatacaaatggtgatgtagcaccaattctataagaagcactctagtcatcagcaaacagggacaatttgatttcctcttttcctaattgaataccctttatttccttctcctgtctaattgccctggccagaacttccaacactatgttgaacaggagtggtgagagagggcatccatgtcttgtgccagttttcaaagggaatgcttccagtttttgcccattcagtatgatattggctgtgggtttgtcatagatagctcttattattttgagatacgtcccatcaatacctaatttattgagagtttttagcatgaagggttgttgaattttgtcaaaggcctttactgcatctattgacataatcatgtggtttttgtctttggttctgtttaaatgctggattacatttattgctttgcgtatattgaaccagccttgcatcccagggatgaagcccacttgatcatggtggataagctttttgatgtgctgctggattcagtttgccagtattttattgaggatttttgcatcaatgttcatcaaggatattggtctaaaattctcttttttggttgtgtctctgcctggctttggtatcaggacgatgctggcctcataaaatgagttagggaggattccctcttttctattgattggaatagtttcagaaggaatggtaccagttcctccttgtacctctggtagaattcggctgtgaatccatctggtcctggactctttttggttggtaagctattgattattgccacaatttcagagcctgttattggtctattcagagattcaacttcttcctggtttagtcttgggagggtgtatgtgtcgaggaatttatccatttcttttagattttctagtttatttgcatatagttgtttgtagtattctctgatggtagtttgtatttctgtgggattggtggtgatatcccctttatcattttttattgcgtctatttgattcttctctcttttcttctttattagtcttgctagcggtctatcaattctgttgatcctttcaaaaaaccagctcatgattgtatatctagaaaaccccattgtctcagcccaaagtctccttaagctgataagcaacttcagcaaagtctcaggatacaaaatcaatgtacaaaaatcacaagcattcttatacaccaataacagacaaacagagagccaaatcatgagtgaactcccattcacaatttcttcaaagagaataaagtacctaggaatccaacttacaagggatgtgaaggacctcttcaaggagaactacaaagcactgctcaatgaaataaaagaggatacaaacaaatggaacaacattccatgctcatgggtaggaagaatcaatatcgtgaaaatggccatactgcccaaggtaatttatagattcaatgccatccccatcaagctaccaatgactttcttcacagaattggaaaaaactactttaaagttcatatggaaccaaaaaagagcccacattgccaagtcaatcctaagccaaaagaacaaagctggaggcatcatgctacctgacttcaaactatactacaaggctacaataaccaaaacagcatggtactggtaccaaaacagagatatagatcaatggaacagaacagagccctcagaaataacgctgcatatctacaactatctgatctttgacaaacctgagaaaaacaagcaatggggaaaggattccatatttaataaatggtgctgggaaaactggctagccatatgtagaaagctgaaactggatcccttccttacaccttatacaaaaattaattcaaggtggattaaagacttaaacgttagacctaaaaccataaaaaccctagaagaaaacctaggcaataccattcaggacataggcatgggcaaggacttcatatttaaaacaccaaaagcaatggcaacaaaagccaaaattgacagatgggatctaattaaactaaagagcttctgcacagcaaaagaaactaccatcagaatgaacaggcaacctataaaatgggagaaaattttcgcaacctactaatctgacaaagggctaatatccagaatctacaatgaactccaacaaatttacaagaaaaaaaacaaacaaccccatcaaaaagtgggcgaaggacatgaacagtcacttctcaaaagaagacatttatgcagccaaaaaacacatgaaaaaatgctcaccatcactggccatcagagaaatgcaaatcaaaaccacaatgagataccacctcacaccagttagaatggcgatcattaaaaagtcaggaagcaacaggtgctggagaggatgtggagaaataggaacacttttacactgttggtgggactgtaaactagttcaaccattgtggaagtgagtgtggcgattcctcagggatctagaactagaaataccatttgacccagcaatcccatcactgggtatatacccaaaggactacaaatcatactgctataaagacacatgcacacgtatgtttattgcagcactattcacagtagcaaagacttggaaccaacccaaatgtccaacaatgatagactggaataagaaaatgtggcacatatacaccatggaatactatgcagccataaaaaatgatgagttcatgtcctttgtagggacatggatgaaattggaaatcatcattctcagtaaactatcacaaggacaaaaaaccaaacaccacatgttctcactcataggtaggaattgaacaatgagaacacatggacacaggaagaggaacatcacactctggggactgttgtggggtgggggaaggggggagggatagcattcggagatatacctaatgctaaatgatgagttaatgggtacagcacaccagcatggcacatgtatacatatgtaactaacctgcacattgtgcacatgtaccctaaaacttaaagtgtaaaaataataaaataaattaatttaaaaaagactccaactccaaaaaaaaataagtatattcaaaagaatcatattaaatttgtaattacagtttaaatggaagggaatttaatgaaatttgtaatcaatctttgaatattaaaaaagtttcaaaaaaaaagcactctagtaagaagaaagtttttgtacaatcctataccaagaaaatgtttcccaatacttttattgacaagagttttgagttctgttgcacagattttatttattctattcattcattaacaaatatttgttgaatatttatatactggccatataccaggaccctgaaatgggaattaaccaagctctaatggatcagagaacacttcccagcatagtaatttctaagctaaaattttaaaaatgacttctgtctccacttccctcatatccaatacatagtgaaatctatcttcaatatatattcagaatctgatatatattgctgtgaactcttatcaactcttgctgtcaccactgtccaagctattatgttttgcctgatttctacaagagcctcctaactggtatccttacttttactcttacacttcaaagtctacatggctccttatgtttgcttctttctttcacaagctacgtatgtaggcatgcttatgtcacttaaaatattcttacgcatctgtttcacttatattatagaccaagaaaaaaatgccgtgtctggcagctaactgacttaagtgaagtttagtagaacagtttctctgtagttataaatttacctgtagaaattcttttggagttgtcatttcagttttagaaacttgcaacaaaaatgacagatcagtagtggcacttacagaaaaacctaaactatacacttcaaactctaaaagctatttccaatagtactgaaaataacaatggttacccattgtagtatctgcggaatgaactaattttcaccttatgttttttaataaatagtttgccaaaatatttggcagaattattcagcaaggaccagaaaatctttgcccttctttttagtttttccaaatttccctgctcaaagaatcattactatttgccttttttctaatttgggatgcgggaaaactaatggaacgctgaattttgtatatgaagtgatgggaaagaaaagatttttgtaccctgcactgaaatcccatcttactggcttcttcttattgctacctaccggagagaggcataatattccatgtccttgaaagagttattctgcgaatcgaatgctacagtaactcagagaattgagtttcgtctacggccataccaccctgaacgctcccgatctcgtctgatctcggaagctaaggagggtcgggcctggttagtacttggatgggagagaattgagtttcatctttccacattaaaaaatgaagttaaagcatctgtaaagcaaaacccaaagtgattattcatttctttccttgtttaagaaacatgcagttactactgctgcactcctctcctaatgatcctgatgccaggaattgcagattcagatttaccacacagagtcttgacccacagctataccccaaagagcaaccacatccaagacacagaagtgaagccaaaaataatgaaagcttctgtatctgaaaagattcttatttaagatctcaggtgagcctatagaattgtggactcaggcaatcaaacatcagtcagacattcagtttcttttcatttgccttgtatttcttgaagtcctaccaagaagtgctccaacggagagcaaacagagatgactgcttaaacagcacctttgcgccacaggaaaatttcctttaggtaaacagtgtttcaattcctatgtagatttcactgtatgtggatgtgtattagggctaaaatcaaaaagcaaattaatgattacacatatttctggaagcagagacaaattactaagtcttatttgtatttactttagttaaacagtttaaatgtttgatgtgaatgtgatacatagctactctgtatctatagggtcctttaattgcaagcaatagaaactgaatcagactaactttaggaaaagggaatttgttgaaaggttatcagaggcatgataggaagctgtataccagacttggtaatgggtaaagaagcaagacatctttggaaactcagaggcagcagcagccttaacagtgctctcataatgaaaaataaactggccagggcaccattactaggaatgaacaaaactaaccattcctgcatctttgtttctccactgactatgtaaattccaaggaggaagcatctaattgaactagtttgggtcacatgcttgcctctttgctagtgaaaggcaggattcctagttacagtccagtgagtaagaattaattccccaatggaattcaaattgtcattaggaaggagaaataaatgctggaagctaaaaagcaacaaatgtttaacacagccactatttattcattgtgtatggtttaccagtcactgtgattcatgtgcattatctcatttaatgcttataacagggctagtagttcagatcctgttataatcctcattttacaggtaagaaaactaaagctttgagaaaggttagatagcttgtgcaaggtcacaccactagaaagtggcagaatcagaacttcagagagaacactcataaaagccatacttctcttgacagagctgtgtattagcattgatgataatatttactgaatctgtccttcaggggtaaaaaaaaaaaaagacaaaaccaaaacgataaaaaacatggtatgtagatagatcaaatctaccagtagtcacataaaacgtagacattctttatgggaatcaagctttgggaataaaagttgtgtaaatgcagaattcatatatgtgcagataatttttctctgatgcaaattcatgatttaatttcttaatacagtgaatgatttgaatatcttagtgaagcacagtcttgagcctgcaaatcaagctttataaataggcttgtatgtttcttggtttatagagaagagattaagggggtaaaaaacttccagtgttctccagttacatagttattgccatctggagatgctaaacaatcttagtaatcccaagaatgaaatgagataatgagcataatgtggctgctaacctctaaaccacacttttgtaaccttggcataattgacattttggaccagataattctttgttgtgggggctctacagtcactgtcccatctgtagcagcatttggtggccaccacccaatagatgccagtagtagccatcccctagttgttacaatcaaaacagctgacttcaaaatcactgccagttttctcaatgacattcttctaatcactaaagtaagtattctgttataaagatatttgtccaagggatttatacaaactattctgaatatttgtcagttgtcttttcttcctttcctccctacccttgccatttttctaaattcatctttggagaaaacactgtttaccattgaacaggatgttcttcctaattccttccagctctaggagttaatgtcttttactgtgctgtatccagatttaataatcagctgatactaggtactagtacagtcttaccagtttgccttaggtcagatgccttcaaaaagggctctgtgatagagattcatgtgcaaaaaattcattagggaatgccctgaagttcagcacctatcggggtggaggaagtgtaggatcaggcaaaatatagttgcacaagggcttcagctgatcccttaaggagctctggagctgggatggcccttcagggttgaatcaccttggggaaaggggactgatcttttgtacccatacactgaccgttgattggttgggggaggctctcaggaagagggcgtgaccttggccaaggtagcagttgttggagagggactcaactgagtaccacaaaccactacttccagcagctggagaaattagtacattagtcctgaaggcaggctctgagtagtgcgccacaggccatgttttgtacactcagatccacttcctctatataataagttcttgtaacagctcctctatgatcctgttagtttctctggtcttttctggggagacttaaaagagaaaagttagtgggaaaagctgtaactcctgctacagctgttctcaggagccaactgattctcatctcccttctctgttcttttttctggactcctcttatgcttggttgaactcttgttctaggggtttacctgatgggatagcacagacctgtatccatgggacctataaggccctgggtgctgtattatggctatgactgctgtgcttgtctatttacagtcaaaattaggcaagggagttccaagagataccctactggatcacttggatgccaatcataattttactttatccgattgtgtaacagccctacctccttttattgatcaggatcaattacctttgctttatttccctgtatagcgttcttgacatgtggagcctgaagtgaccaggtgacagtagtagctaaaagtgtaatgaaactcattctactgtttcctctcgtggaagcattccccctccaagagtcagtacctctaaagcccagagtttgcaagggtgagaagcacatattatctgagtcagttattaagaatggcgataagtaagtagggccactcttatttctacccctcggttcctgaacccataaattgtacttctgggaaacataggaaacatagctctatttaatggttattgatatacagtgtattctgtgacctagagagtggattacaggatatgatctccaaggtgaagtcttagctctgccttcaataggccattccatcattctgttaggccagtaacttctagttgtatagtctgtgataagacttctatctgccatagcagttatggcatttctatttcacgtaatgtggactgctttctgtatgcttccaggaaccaccgtagttgtgtcttagcatcctctcatgtagtctttctggggtgctaaatcctgtgagagaatgttcccatatcaataatctctccattatgcaaacacaggttctgtctcctcttgatctagcactctctcatacgtagtctcctgcctcctgtggatacatgttggctaggtcctacagttcatttgatatatactgcctttctaagctggattatgatgcaacttgattcatggcattggtctgggatccaaatgaggaggtgcaaggtagatcttggtggcaggataggggtggtagtagtggaattgcatgtgtcatcatgaaagactgagtattatttattatgtttaaacaaaagggaaatgctagtctctaggtaggagtataatacacatcaacagtttaatagagcttatttctggatgaaaacatgagtgacttaaagggttttatttatatcattttttaaagttatctttaaaaataattctctgtaatcattgtataattaaatatacattgtatttaaagagccatatataggctgcacactgtattaaaagatatgtgtgatagccagctaggtactattcgaatgaaaatatttgtattgctcttcagcgctgatgattatgggaacaagagagtggggagaagaaggaaacataaaatttctatttattacaagtgggtattaatatagtagactcatgtgtaaagactatttctagtccaaaatgtttggtaagggaatattattttcccatagatatgaaatccatatctcttgatccaagaactcacctcctatttctgaactggtaatagttttgcatgctctagtaatgcatcagttatcatccttgaactcttctttcttgagagtatgattatcaggcaagtaggggtacccatgtagaagggagtagagacaccaagggctgaatcttgaaattgcaaaggatggagaagctggtttttgataataaattgaaataaaagagtttccctgaaagtctttcatgcttcttacctaacatgaaattattttcaaataattagactttgaaaaatagttggtatattaggattctccagagagacagagtcaatagggcatgtgtgtgtgtgtgtgtgtgtagaaagagatttatcataaaggactggctgtcatgattctggaggctgagaagtcctaagatctgtagtcaataagctggaaacccaggagagctgataagtggttccaaaggcctgagaagcaggagaactgatggtgtaaattccagactaaaagctggaagattgaaatcaaataagggcttatgttttagtttcattcctaagaccagaaaagatcagtgtcagacaggagttccttcgtactcagtctttttgttttagtcaggtcttcaatcaattagatgaggccaccacattagggcaggcagtctgctttactcagtctactgatgtaaatgttaatctcatttataaacacccttacagacacgcccagaataatctttagccaaatatcagtatctcagtttagtagatacataaaattaaccaccgcagataatgattttttgcataaattcatttatcatgtatttattgaacctctgtcttgtatttaatcttttgaataatataaagagctatgagataatttttttagctggaggaacataacatccaaattcctctcttaagaatagttttggacatgggctgggaagaaagtcttagcatgttcaaaacagaattcttgatttccaccacccatcacctgccacatttgctccttcacaagactttcttttctcaataaatggcaccagctgcacaaaccaaaatcctagaagttatcctttcttcaaagctcacataaagtcttctgaaaaggtcgacatgtgtacttcataataattctaagttcatcagcttaccacctttcttcactgtatcccctgtagcccaagtcactatgaactttcaccaggtcaaatctgtcttcagaatatctctcaactatgtcacttatcaccatctccactactgtgtcacaagaccaagctaccattatctttactaggactactcgctttcactctttcacccactcccaccctactacagtacattttccatacagcagctaaattcccagagcataaatcagatcacggcattcccatacatgaaatcttccaaaggttttccaaatgtcacctcttcagaaaagccatttatggccaatttaggccaaaataactgcatattatcctccctgcacctggcatgttgtaccaccaatgcattattttttttcctagcacttatcagtaactgtaattatcctatttactatttcaaatggtggtcgtctgttttcccctcaagaagaatgaggggccttaaaagagccatgtggttccagtataagcaaaggtgctggatagtttgtaggcactcattaaatatttgccgattgaatgagaatggaggtcacagcaaggattcctcttgccaaaatacttgttcttttcagcagagtctgaggaaaagctgtacttgttttgtactttgttttatgaaggagcttctgcactgtgtctgcgcactcatatgtcaattttgtgttggaaaaaaaatgatgtggtcctttgctgtcattttatgcggctggcaggcttctgtttccaccataaccgggagctttgcttgttgctggcagatgagcatgattatcagccatgagaaaataataaaaggctctcagttctaggatactctaggacttttcatgttttcaatgaagtaaattaactctgttctttcattttatggaaatggctctgaatctcattaaaaacacacatgtatatgactagatggattttgggacttaccatcttgtgttcatcttatttttaaaaaatctcatttttaaaattccaaccacttttgcctactcggaacactcatatttgggtttctatggtgcattcctctgcgaataggttcttttttccagtgtattttcctaccttgtgtacaaatgtcttttttgtatttgcaagggaaaaagtaccatgccaagcaccaaagtttaagcttctccatcaatattactttttcatcagttttttttccccttttcccaagggaaaaacaccttaaatcagcatgaagaatattctctgtagctcatgtggagtctgatttaggacagaaataagtgcattccaattttcctgttttctatattttctttttcaatgccattgactctttcaagcaagacatatttactaaggccagctatctatctagcacagtaagacgtattgtgggataaagcaggggtcagcaaaacatggcgaatgggccaaatccagtttgcccggtgttttcttaaataaagttctgttgaaacacagcttcacccatttatttacgtattatttatggctgcttttacatgcaacaacagcagagttgagtagttgtgatggtgaccatatggcctactaagcctgaaatatgttctctctcttcctctacaaaagtttgccagcccctggtgtataaagcatgacctccattccgatagggtttatgaactaattgggttgcttgttaaaacacgaagcaattactgaatcaataaatgccaagttgtatggtacggaagggattcgatgccacagaatggtcattggttaggaaataaatctcatttatagagaactgattagttaagtatgtcaaaatgcagaaaaggtccttatattatatggcctttcctccctcatgctgtacttctttaagtctcagctatgctgtaaaattaaaagatattcaaaactgttagcaaagcttttcctagatgtaaatcttccaggactccctcaaaggtatgcttggcagaaacaggacaggattaagattgctaaattgttcagaaccctgcctggcaagtcatagatcctcagctattgcttgaataaacaaaagaacatgcaaactataaaagaagggaaatccgatgcagctacatcataataatagctaatgttattgagtattcataatattgctggtatttctcagcaggaaatatcctgattctttaaagagtaagtggtagtgggcatgtaaactgcttagctcaatgcctaacacatggcacattataagtgttcaataaaagtttttactgtcatttttttagagggaattgtatacaagttgagaatccccaatctgaaaatttgaagtccagaatgctttaagtaaaaactttttgagcactgacatatgttgctcaaagagaatcctcatggggatattttgcatttaggatttttggatttgggatcctcagctggtagttataatgcaaatattccaaaatcaaaaaaatccaaaattcgaaacacttctggtcccaagagggatactcaacctgtgttctctttcagagagagtgctaattgtactcatatgcatgaaagtaagaaaagcagataaactgacccttaattgtatcactctcttgattaagcattaagaaaacatttgtatttgattttctaatcctgtattagtttgttaaagataatggcttccagctccattcatgttcctccaaagagcatgatcgtgttcttcttatgtctacatagtattccagggtgtatatgtaccacattttctttatccagtctgttattgatgggcatttaggttgactccatgtctttgctattgtgaatagcacagcagtggacatatgcatgcatgtgtctttatgatagaatgattcattttcctttgagtgtatacctagcaatgggatttctgggttaaatggtaattctgtttttagctctttgaggaattgcccacttctttccacaatggttgaactaacttacactgccatcagcagtgtataagcattcccttttctcctcaaccttgccagcatctgtaattttttgacttttaaataatagctattatgactggtgtgagacagtatctcattgtggttttgatttgcatttctctaatgatcagtaatactgggcttttcttcatacgtctgttggccacatgtatgtcttcttttgaaaagtgtctgttaatgttctttgcacattttttaatggagttgtttttctcttgtaaatttgtttaaatttcttatggatgctagatattagacctttgtcagatgcatagtttgtgaaaattttcttccattctgtaggttgtctgtttactggtagtttcttttgctgtgcagaacctctttagtttttttttttgtttgttttttgttttgttttagtttaatttaatcccatttgtcaatttttgctttggttgtaattgcttttggtgacttcgtcatgaaatctttgtccattcgtatgtccagaatggtattgcctaggttatcttccagggtttttaaagttttgagttttacatttaagtctttaatgcatcttgagttgatttttgtatatggcataaggaaggggtccagtttcagtcttctccatatgactagccagttatcctagcaccatttatcaaatagggagttctttccccattgcttgtttttgtcagctttgccaaagatcagatggttgtaggtgtgaggctttatttctgggctctctattctgtttctttggaacaacagatgctgtgacctactagagggtagagggtgggaagagggagaggatcaggaaaaatgactaatggatactaggtttaatacctgggtgatgaaatactctgtacaacaaacccccatgacaaaagttgacctatgtaacaaatatgcacatagacccctcaacttttttaaaaaaagaaagtggtgaaaatggagggtctaatttacagtctgtagataggtcaaatactctacccaaactcctttcttccccacccccaagaaaaaaagaaatcatttgtgttttttttcccccaactgtaccaccagtactccagatctcaaaaccagtggtttctaagattgctgttttcttatttcttatgggggacttcggcagggaaaaatttttgaaaggctaaaaatgactggagaagaggacttttttccccattagctaaagctttcattttgttgaggtacctcctattattggttttgtgaaatgtgaccttctccctgtttcacatatccatgtattctcccttggatcttgtaaaatggcctcaagagaatagattgggatttctagaatattttaataatgtagccctgttggtatttccctaattgatcttatgccctttttgctaactctttagttaactctttaattcaatgtagactatttgtaaaataaattcagtggatttaaacttaagaaaagaaaacattcttgtttagaaaatacataggagagtgataagtgataatcttaaacaagctgttgtttcataaatgcagaatcattctttttatttagtaatgctgattatcaataataacccattaatatgttttaactatcaacaaaaattataatatctgaggctgcatctactcagaagcttacttttataaaaactcagtttcgtttaacatagattctatgttatttttttcctcaatgaattttcatgaaggaagcacacctgtgtaacaaggacccaggccaagaagcagaatattaccaacatcccggaccctcacctccccatccactccttccagtcactactatcccctcaaagggaactactttcttgccataaagaacatatattacaaagactaattgaaaggggttagttagtatgtccttttaataagttcacagaagtattacaagagcaatctggcattttaagaagagaatagtcttctgacattgaagcatttcatgctaaacatgtcaaaatgttttctacatcatcagtaatgtgctcagacaagtttaatataaaagccttcaagagcagacagttattttcctcttcttgaagagtgaggcagactttacctgaaaaagttaatgattttaaaaaaaatcaatctgttggggtttcattaggatactgtcttggtctgttttgtgctgctatatcagaatacctaagactgagtaatttgtaatgaacagaaatttattttctaggctgagtgtaatagctcatgcctaatcccagcactttgggaggctgaggtgggcagattgcttgagcccaggaattcaagactagcctggtcaacatggcaaaaccacatctctacaaaaaatacaaacattagttgggcatagtggcatgcatttgcagtcccagctactcgataggctgaggtagaaagattgcttgagccctgagagtcagaggtttcagtgagccaagattgtgccactgtactccagcctgggtgacagaatgagaccctgtcttaaaaaagaaagaaagaaaaagaaatttattttctcacagtctcacagttctattggtgaggaagttcaggtcaaggtgctggcatttggtgaaggccttcttgctgcatcctcccatggcagaagatgagagggcaagaaatagagaagggggctgaactcattcttttataaggaacccccctgacatgtcaaccctactacctcagtaatgacattagttatcccttcacaagggcagagccctcatgataatcacctcttaaagttctcacctctaaatactcttacaatggcagttagatttcaacttgacttttggaggggatattcaaaccacagcagatgcccactagtcagtcatgcaaactagccagaaatagagatgtgaaaagtaaatttgagtgaatctttgttgtgtcaataccctatacattcagtaattttatgtttttatatttcactaatgtctgtaatcaaattcatatctctccttctcctgtgctccaaaggctgtgctaatctatttcctcatcctagtttttctttgttttacttcatgttatatgcttttaaattacttaaacaaaaaaggatgtcattataattgtttttcccaaatgtttagtttggcatctgttgcaaggccttagttataggctgaagtgccaaaagcttgaactgaaaacaagaatgtggtgggcaagcctgagatctgaattcagaagtggtgtttatattttcccaagggccttattagtgagagtccaagccctaaatgttaacttgcaacacgtttgaacagactgacttttctgttttgttaagtataatggcatatcattctgtatgggtacttctgtaaacaatcttctcttttaactgccctttaagctactaaacaatgttgtcaaatttgaggctgtgtttttgttcaatattccatggcacatattcacacaatagagttttatttgtttttattttattcatttccatagattattggggagcaggtggtatttggttacatgagtaagttcttcagtggtgatttgtgagatttgggtgatatttggtttcatgcttaactcctttagtggtgatttgtgagattttggtgcacccatcacccaagcagtatacactgcacccaatttgtagtcttttattcctcacctccttcccaccctttccccctgagtcccgaaagtccactgtgtcatttttatgccctcacatcctcacagcttagctcccacttatgagtgacaacatatgatatttggttttccattcctgagttacttcacttagaataatagtctctggtccgattcagattgctgtgaatgccattaatttattcatttttatggctgagtagtattctatcgtgtatgtagaccacggtttctttatctactcattgattgatgggttcctgatggcttccacctttttgcaattgtgaattgtgctgctataaacatgtgtgtgcaagtatcttttcatatgatgacttatttttctctgggtagatacccagtagtgggattgctggatcaaatggtagttgtacttttagttctttaaggaatctccacactgttttccatagtggttgtactagtttacattctcactagcagtgtagaagtgttctctgttcaccacatccatgcagacatctatttttttttaaatttcttatggccattgttgcagtagtaaagtggtattgcattgtgattttgatttgcatttccctgatcattagtgatgttgagcattttttcatatgtttgttggccatttgtttatgttcttttgataattgtgtattcattcttttgataattgtgtaaagtccttagcccactttttgatgggattctttgtttttttcttactaatttttttgagttggtggtacattctggatattagtcctttgtcagatgtatagattgtgaagattttctcccactctgtgggttgtctgtttattttgctgactgtttcttttgctgtgcaaaagctctttagtttaattaagtcccagttatttatctttgtttttattgcatttgtttttgggttcttggtcatgaaatccttgcttaagctaatgtctagaaggctttttccaatgttatcttctagaatttttatagtttcaggtcttaggtttaagtccttgatccatcttgagttgatatttgtataaggtgagagataaggatccagtttcattctcctatgtgtagcttgccaattatcccagcaccatttgttgaatagggcgtcttttccccacttcatatttttgtttgctttgtcgaagatcagttggctataagtatttggatttatttctgggctctctattttgtttttgcttagtcttgctttggctatacaggctcttttttggttccatatgaatttggggatagttttttttctaattctgtgaagaatgttggtggtattttgataggaattgcattgaatttgtagattgcttttggcagtatgatcattttcacaatattgattctgtccatccatgcgcatggaatgtatttccatttgtttgtgtagtctatgatttctttcaacagtgttttctagttttccttgcagaggtctttcacctccttagttaggtatattgctaagttgtttgtttgttttgttttgttttgttttgtttgcagctattataaaaggggttgagtacgtgatttgattctcagcttggtcacttggtgtacagaagagctactggtttgtgtatgttaattttggatctggaaactgttgacttttgtcagttctagaagctgtctggaggagtctttagggttttctaggtaaacaggtcatcagcaaacagtgacagtgtaacttcctctttaccaatttggatgctctttgtatctttctcttttcttttttttttcttttttttattattatacttcaagttctagggtacacgtgcacaacgtgcaggtttgttacatatgtatacatgtgccatgttggtgtgctgcacccattaactcatcatttacattaggtatatctcctaatgctatccctcccccctccccccaccccacaacaggccccggtgtgtgatgttccccttcctgtgtccaagtgttctcattgttcaaatcccacctatgagtgagaacatgtggtgtttggttttctgtccttgcgatagtttgctgagaatgatggataccagcttcatccatgtcccaacaaaggacatgaactcttccttttttatggctgcatagtattccatggtgtatatgatgtgccacattttcttaatccagtctatcattgatgggcatttgggttggttccaagtctttcctattgtgaatagtgccgcaataaacatacctgtgcatgtgtctttatagcagcatgatttataatcctttgggtatatgcccagtaatgggatggctgggtcaaatggtatttagttctagatccttgaggaatcgccacactgacttccactatggttgaactagtttacagtcccaccaacagtgtaaaagttttcctgtttctccacatcctctccagcacctgttgtttcctgactttttaatgattgccattctaactggtgtgagatggtgtctcattgtggttttgatttgcatttttctgatggccagtgatgatgagaattttttcatgtgcctgttggctgcataaatgtcttcttttgagaagtgtccgttcttaccttttgcccactttttgatggggatgtttgattttttcttgtaaatttgtttaagttctttgtagattctggatattagccctttgtcagatgggtagattgcaaaaattttctcccattctgtaggttgcctgttcactctgatggtagtttcttttgctgtgcagaagctctttagtttaattagatcccatttgtcaattttggcttttgttgccattgctttcggtgttttagacatgaagtccttgcccatgcctatgtcctgaatgctattgtctagattttcttctagggtttttatggttttaggtctaacatttaagtctttaatctatcttgaattaatttttgtataaggtgtaaggaagggatccagtttcagctttctacatatggctagccagttttcccagcaccattcattaaatagggaatcgtttccccatttcttgtttttgtcaggtttgtcaaagatcagatggttgtagatgtgtggtattatttctgagtgctctgttctgttgcattggtctatatctctgttttggtaccagtaccatgctgttttggttactgtagccttgtagtatagtttgaagtcaggtagcatgatgcctccagctttgttcttttggcttaggattgacttggcaatgcgggctctttttgggttccatatgaactttaaagtagttttttccaattctgtgaagaaagtcattggtagcttgatcgcgatggcattgaatctataaattaccttgggcagtatggccattttcacgatattgattattcctatccatgagcatggaatgttcttccatttgtttgtgtcctctttcatttcattgagcagtggtttgtagttctccttgaagaggtccttcacatcccttgtaagttggattcctaggtattttattctctttgaagcaattgtgaatgggagttcactcatgatttggctctctgtttgtctgttattggtgtataagaatgcttgtgatttttgcacattgattctgtatcctgagactttgctgaatttgcttatgagcttaaggagatttggggctgagacgacgtggttttctagatatacaatcatgtcatcagcaaacagggacaatttgacttcctgttttcctaactgaataccctttatttctttctcctgcctgattgaccttgccagagcttctaacactatgttgattaggagtggtgagaggggacatccctgtcttgtgccagttttcaaggggaatgcttccagtttttgcccattcagtatgatattggctgtgggtttgtcataaatagttcttattattttgagatacttcccatcaatacctaatttactaagagtttttagcttgaagcgttgttgagttttgtcaaaggccttttctgcatctattgaaataatcctgtggtttttgtcattggttctgttcatatgctggattacacttattgatttgtgtatgtcaaaccagccttgcatcccagggatgaagccaacttgatcatggtggataagctttttgatgtgctgctggattcggtttgccagtattttcttgaggatttttgcatcaatgttcatcagggatattggtctaaaattctgttttttattgtgtctctgccaggctttggtatcaggatgatgctggcctcataaaatgagttagggaggattccctctttttctattgattggaatagtttcagaaggaatggtacaagctcctccttgtacctctggtagaattcggctgtgaatccatctggtcctggattgtttttggttggtaaactattaattattgcctcaatttcagagcctgttattggtctattcggggattcaacttcttcctggtttagtcttgggagggtgtatgtgtcgaggaatttatccttttcttctagattttctagtttatttgcatagagatgtttatagtattctctgatggtagtttgtatttctgtgggatcggtggtgataaccccttttaccattttttattgcgtctatttgattcttctctcttttcttctttattagtgttgatagcggtctatcaattttattgatcttttcaaaaaacaagctcctggatgcattgattttttgaagggttttctgtgtctctatctccttcagttctgctctgatcttagttatttcttgccttttgctagcttttgtatctgtttgctcttgcttctctagttcttttaattgtgatgttagggtgtcaattttagatctttcctcctttctcttgtgggcatttagtgctataaatttccatctacacactgctttcaatgtgtcccagaaattctggtatgttgtgtctttgttctcattggtttcaaagaacatctttatttctgccttcatttcgttatgtacccagtagtcattcaggagcaggttgttcagtttccatgtagttgagtggttttgagtgagtttcttaatcgtgagttctagtttgattgccctgtggtctgagagacagtttgttataatttctgttcttttacatttgctgaggagtgctttacttccaactatgtggtcagtttttgaataagtgtgatgtgttgctgagaagaatgtatattctgttgatttggggtggagagttctgtagatatctattaggtccgcctggtgcagagctgaattcaattcctggatatccttgttaactttctatctccttgatctgtctaatgttgacagtgggatgttaaagtctcccattattattgtgtgggagtctaagtctctttgtaggtctctaaggacttgctttatgaatctgggtgctcctgtattgggtgcatatatatttaggatagttagttcttcttgttgaattgatccctttaccattatgtaatggccttctttgtctcttttgatctctgttggtttaaagtctgttttatcagagactaggattgcaacccctgcctttttttgttttccatttgcctggtagatcttcctccatccctttattttgagcctatgtgtgtctctgcacatgagatgggtctcctgaatacagcacactgatgggtcttgactctttatccaatttgccagtctgtgtcttttaaatggagcatttagcccatttacatttaaggttaatattgttatgtgtgaatttcatcctgtcattatgatattaactggttattttgcttgttagttgatgcattttcttcctagcatcgatggtctttacaatttggcatgtattttcagtgtctggtagtggttgttcctttccaggtttagtgcttccttcaggagctcttgtaaggcaggcctggtgttgacaaaatctctcagcatttgcttgtctgtaaaggattttatttctccttcacttatgaagcttagtttggctggatatgaaattctgggttgaaaattcttttctttaaaaacgttgaatattagcccccactctattctggcttgtagagtttttgccaaggcatccactgtgaacgccacaaagatactcctcaagaagagtaactctaagacacatgattgtcagattcaccaaagttgaaatgaaggaaaaaatattaagggcagccagagagaaaggtcaggttacccacaaagggaagcccatcagactaacagtggatctctcggccaaaattctttctcttttctgattgctctgactaggacttccagtactatgttgaagaggagtagtgagagtgggcagccttgtcttgttccagttctcagagggaatgctttcaacttttccccgttcagtattatgttggctgtgggtttgtcataaatggtttttattaccttgaggcatgtcccttgtatgccaattttgctgagagttttaatcataaaggaatgttggattttgtcaaatggctcatgtgatttttgtttttgattctgtttatgtggtgtatcacatttattgacttgcatatgttaaactatccctgcatccctggtattaaacccactttaatcatgctggattatctctgatatgttgttggattcagttagctagtattttgttgaggttttttgcatatctgttcaacagggatattggtcggtagttttcttttttggttgtatcctttcctgatttagatattagggtgatactggcttcatagaatgatttagggaggcgtccctctttttctgtcttgtagaatagtgtcaataggattggtaacagttcttttttaatgtctggtataaagctgttgtgaatgcgtctggtcctggacttgttttgttggtaattttttattaccctttcagtctcactgctttttattggtctgttctaagtatctaattcttcttgatttaagataggagtgtttgtctttccaggaatttatccatctcctctaggttttctggtttatgcacataaaggtgttcatagtagctttgaatgatgtttagtatttctgtgatgtcagttgtaatatctcccatttcatttctaattgagcttagttggatgttctctcttcttttcttggttaatcttgctaatggtaattcaattttatttatcgtttcaaagaaccagctttttgtttcatgtatcttttgtattgttttttgtttgtttcagtttcacttggttctgctcacatttcggttatttcctttcttctgctgggtttgggtttggtttgttcttacttctctagttccttgaggtgtgactttagattatctgtttgtgctctttcagactctttgatataggcgtttagggctgtaaactttcctcctagcaccacctttgctgtatcccagaggtattgataggttgtgtcactattgtcattcagttcgaagagtttttaatttccatcatgatttcattgttagcccaatgatcattcgggagcaagtcatttaatttccatgtatttgcatggttttgaaggttccttttggagttgatttccagttttattccactgtggtctgagagagtgcttgatataatttcaattttcttaaatttattgaggcttgttttgtggcctgtcatatggtctatcttggagaaagttccatgcactgttgattagaatgtatattctgtggttgttgggtagaacgttctgtaaatatctgttaagtctacttgttccagggtatagtttaaatgcattgttattttgttggctttctgtcttgatgacctgtctcgtgctgtcagtgtagtatttaagtccccccactattattatgttgctgtctatctcatttcttaggtctattagtaattgttttataaatttgggatctcccaaatttatatatttatgattctgatacttccctgttggacaaagccttttattgttatataatgtccctctttgtcttttttaactgctgtttttaaagtttgttttatgtgatataggaatagctactcctgctcactttcggtgtccatttgcatggaatgttgttttccatccctttaccttaagtttgtgtgagtccatatgtgttaggtgtgtctcgaaggcagcagatatttagttgatgaattcttatctattcggcaattttgtatcttttaagtggagcatttaggccatttatgttcaatgttagtattgagatgtgaggtactattccattcatcatgctatttgttgcctgtataccttggtttttttttttttaattgtatttttgttttataggtcctgtgagatttatgctttaaagaggttctgttttgatgtgtttccagaatttgtttcaagatttagagctccttttagcagttcttgtagtgctggcttggtagtggcaaattttctcagcatatgtttgtttgtctgaaaaagactgtatctttccttcatttatgaagcttagttttgctgggtacaaaattcttggctgataattgttttgtttgaggaggctaaagatagggccccaatccttctagcctgtagggtttctgctgagaaatctattgttaatctgattggttttcctttataggttacctggtgtttttgcctcacagctcttaaaattctgtcctccatcttaactttagataacctgttgacagtgtgcctaggtgattatctttttatgatgaatttcccaggtgttgtttgagcctcctgtatttggatgtctaggtttctagcaaggctggggaacttttcctcaattattcccccaaatatattttctaaacttttagttttctcttcctcctcaggaacaccgattattcttaggtttggccatttaacataatcccagacttcttggagtctttgttcatattttcttattcttttttctttgtctttgttggattgggttaatttgaaaactttatcttcaagctctgaagttctttcttctgcttgttcaattctattgctgagattttccagagcattttgtatttctataagtgtgtccatcatttcctgaaggtttaattgtttattatttatgctatttatttccttgaatagttctcctttcacttcttgtattatattttggatttccttacattggactttgcctttctctggtgcctcccttattagcttaataactaactgtctgaattctttttcaggtaaatcagggatttcttcttggtctggattcatatttggtgagctagtgtgatttttagggggtgttaaagaaccttgttttttcccattaccagggttggttttctggtttcttatttggataggctctgtcagaagaaggtctagggctcaaggctcttgttcagattattttgtcccacgggatactcccttgatgtaatactcttctcctttcctagggatgggggttcccgagagctgagctgtaatgattgttatctctcttctggatatagccacctagcaaatgtatcagactctgggctagtactggaggttgtctgcacagagtcctgtgatgtgaaccatctttgggtctctcagccatggatacgagcacctgctcgggtggcagtggcaggggagtgaaatggactctgagtgttcttagctttggttgattagtgtgctatttttgtgctggttgacctgctgggaagtggcacttgcaagagagcatcagctatgggagtatggggggggaacatttggtaggtggggccccataactcccaagagtatatgcccattgtcttcagttaccagggtggtaggaaaggaccattagatggtggcagggctaggcatgcctgggcttggactctacttgggcaggtcttgctgcaactgctgtgggagatgggggtgaggttcccacgtcagtggaattatgttcctaggaggattatggctgcctctgttgtgtcatgcaggttgccaggaaactgggggaaagacaggagtcacaggcctcactcagctcccgtctaacccaaatggctggtctcactcccactgtgcccccccgccaagagcaccaagtctgtttccaggcagtgagtgagcagggctaagaacttgccccatgttacccacctcccagctgtgaaagtaagcagggctttccttctccccccacctgtggagtctgcacgctggattcatgccctcttcagagttctggccaggagacttctcaatcggttcaaattgttgcaaagttccactggaggtttccttctccctgtggtttttttcccagtgcctctggcagccctcctcaagggcccctgtgaggcaaggcagaaaatgccttgctaggggaccctagcaagcccacagggggaccctagagcaagcccacagggctttgcatgttgcttcctctacctctgtatttcccttggctctctaaattgactcagttccagttaaggttagaatcttttcccatcatctagagcttcaggttccccagtgtgggggtgtattctggggcagacgatctccctttcctgcttccacagtttgggcacccacagtatttggggtgtctcccaggtcctgcaggagcaatccacttccttcagagggtctgtgggttctcttggctttcctaacgttttcttgcactggttctggagcaaaagttcatgatgcaagcctccatatgatgttctgtacgtccaagtgggggctgcaatctagtcctgcctcccgtctgccatgatctgtttcaccccactgaaggtttttgagcaggagtggctgagtctcatatttgtgacttacccagaggatggtttaggggtttttatgtttgtttttttagagacagtgtcttgccctgtcactcaggctgggcgatcttagctcactcgagttttattttttgatattttcaaaagtataaacaacttaaatgtctatcaatcggaaactagttaaatgaactatgttactgtggaatactatgcatccattaaaagaatgatatttatctatatttgttgatatggttgcaaaatcacctgaatcatatgatcctattgaaatatattttgctatatctgtttctatgtatatgtatgtatgtatatatatataaaagtatatttaaataagcaaaggaaagatgattgatgcttttctgtgagaggttggattgtgagagattatgcttcctactttgtacttctttatttaaacatatgacatactgattatgtcttacctctaaaaagagaaaaacaattttaacagactgttattttgtgtttgtttcttatatgtctagtgttttgctgtttttctcttaaattttaaaagtttattcagaatcttccgcagagctttgcctagaacagcacacaggtttgacttgagtataccagacagatgtagcctagagtttgagccatgtcatgcataaggggacgtgatgactggtgaagtcagtaccaagactggcaatggcatcagggtcagagagagttctttagctgagttttctactcattcatctaggggagttttgtaactttaataggactagagaaacatttacattgaggcattaggagcatgttcacactgctcaacccacaggattaagaatgagatttatgtaaagtgagtagggttagatgagtgcatgcacttggtcctcctgttttctaattgccgaagaagcgctttgagatggggaacaggaatgtatgtgtagacaagggcatatttttcagtgagacacgataggatatattcttcaatagaatgaagttaagaaggcgaatctagttattagtggtttgttgaaataaaactaatttggaaaataacttgtttctcatatgtatctccatcaattatttgcttaatcttccatatatgtctttttttcaaactggctttttcatgcataccaaatcccataaaaattgaagttattctttctgactagaaatcagagaagatttataactgcttgtaatttaggtgaatattgatttactgcaacagtcagatgaactggagatagcattaacaccctcaggaaatgaaaaatgctaagaaatagtacttaattagaaactgtgacagattgtattttccaaaaatggccacagcagtttctccagtcccacattctctctgtcagtaaacagcatctatttcccttcccctttaatatggggctgaactttatgcctgtatcaacaaactgagtgtgatggttatgacattgcatgactttgagtctatgtcataaaaagcaataaggcttctacctacctctttttctctctgaaaacactcacttttggaaccagccactatgctgtgagaaaactcaaactagcgtatgagagaggatccatatgggatggtccacatgcagaggagctgaggcctccaaccttcatccagcatcaactaccagatgagagagcgaatgagccttcatatgattctagctcctagccttttagtcttcctactgaagtcccaaacatggagcagagacaagctgtcccagcagtgctgtgttcaaatttctaaccatagaatttgtgagcataattagtaattattttataccattgagttttgcagtaatttgttttacagccatagtaactggtacagggccatttctcctatactcagagtggataaggatgtgtcagcagaaaagaacatggttctttttaagagataattttatatctccatggtgtgacctggattcaaagagtaatttttaaagatatttgtagctaatattttatttgaagtgcacaaagaagagtaaccagaggactggttattttaaaaactgctaaataaagcagtttttcagtgaccactgaaaggagtctcctttaggtccaattaaataccccttgagtgctgtggtttgaatgtgtccccaaaaagcatatgttgggaacttaatccccagtgcaacagtgttatgccagttataagagggcttgaggctctctctcaccttctgtttgcccttccagcatgggatatcacagcaaaaagtcccttacctccagaaacataagccaagaaatttctgttcattataaattacccagtctcaggtagtccattatagcaacacaaaacggactaggacattgagattctaggttgttttacgatttggaatgttatccagactgatagaccaatccagaatattgtcttatgtgcttttcagagatatttcaacatggcattaaataattcctccagtttcacaaacacaaaattggtaatgccgtgaagaaataattaggtgagagcgctcagtactttaaatagatctaacaaagtttggaaaatgaatgatcctcagtaaatgaagattttatgataaaaattaagactcgacaaattatcaaaattttttataaatttcaaaacgtatgtaattttcaaataatctcatatattattactaattttgttttcccctattcaggttgattatatgtgtgtaccataaaaataaaggcaacctgctatctattatttagtgatgcagacctctttttcatgtgatactgtattttattaatagataatgtaaaatttaaagagtaccatcactcatgtactgagtactttgaaaaataacttgcagtttcttgtaattgttttctgtcatttgcacacattatttttgatggcagaatatcatttgacttctgaaaattttgaaaatacctttagttttttggagcaattgctaaaataaagtaagtaattgtctcttctatatttttgttctttatttagtaaattcagcaaacatttagtcagctgcaccatgtgccaggtactgctctagcctttggaaatacagaagtaaatacatcagaatctctgcgtttctagtttttcttagggagcttacattttggtggggtatggaactgacaatcaagtatgatgttttgggatggtaaatagcataaggaaggagcagggtaatgaattagtgatgcagatgaagagctggggtgctcttttagataaagtgagtgagatcaggcctcagagattaactgaattggcacttaaaaagagacttgaatgtagagagtgggaccaagtcatgcagctattttgaagaaggaagttccttatagagggcacaacatatacaaaagcctgactgataaagaagagaacctttgagaaaaggtaaggagaacaggatggctagagctaaatgagcaaatggaatacctttatgagatgaagtaaaaaaggtgatggcccacaaggaaagtgaaaaaagtgattgagatggaggggtgaatatccctatcaaatattgctaatatgtctagtgaaatgtggatttacaatggagtagtcattaattcatgtagtatcttattatgtcacattgaagggactcaaaaaaattgtaatttaatgtctaaaagggattagtggatttacagtcatagcaattatttttagtttttaaatatctatatatatttcagagaagtaaatagatgacaactaagttttatgcataagatatattacaaggataaaatgggagagacagagggatgaatacaaaagtttaaggaaagagaaggaatgatgtaaaattttctagttaatatgtttatatattttttaaataagtgatggttaggtatacataggttatatcagaaagagtaactgttcgagttattatgtcaacaagcatagtacacaggaaactccatgttttataactaggaagcttatgataaagttttagatggcaacttaaatatatgtgagggtcatacaagacctagtatttgaagaccactgaattaaatcaatttgagaacggtatcaaggatttgtaatatactggtttatagttagttttctctatttcatatgatgtattgtacctctaacttttatcagccatgaagaaaatgggtatcattggctattggtccatgaaaataatattgagatgggtcagtataagttctgtttgaaaaccgtctcaaaacttacgggttagtagcattcgttcattcagaaaacctttattaaacacctaccaagaagatacaactattatttcctcatagtatgccctatttgggcactgttgattagttacggtagccccagtggcataggtgatctggaaattatatcagtgcatttctttaatatttattatgcttaatttataagcaaagcacatgtctccaagaagctttaatcaagttgcttgcttttacatataacataattctattttaaaatattttcattgaatctcttttccattttttgagattcgtagaattgtgcctggcttattcacagtcaaaaccagacacctatagtcttaattatgtgcaagtttccacagtaaatagttcttatttttaaattaaatttgttcattttattttccatcaatagtttacgtggctgtaaaatatgtactatctttgaatctttgcttcctcactaacttttgtggttttgactatcgagtaattaatgattaagtaattttgccaataaaccacacttaaattacttattattggtaactatagttgagatgttgtgactatttgataaaaaatatatctgtttactttcccttctttgtattatcaaagattattttgttgtacatgtaatttaaaagtatgtagttctctttataagtcaaaaatacagaaaatatagccattacaatgacccttaatatatatttatttatcatgctcctcttctcccttgcctttttagaataaaataacagaataatgagaaccagatttttaaatgtcgttttgctgcaattttttttcaagcattatttgaaaagtgtttccatagcctttccactaactttactatttgatttgatcaagagaagtactttagcacatatggatattttgattctaatcaaatgtttttgttcattaattttttcttatacttgttttattttaggttctgaatagtcttttactgtattacttattcttccttaaaaatgtaatacagttgttttaaaaagataaccacactacacatattatttttattaaatcttcatcttctatcataaaactatgtacgctaattcattgtagcagtatgagttcagattctggagctagacacttacatgttctaactatggttatgctactgatttcagacatagaactttttggtattttaatttcctaatctgtaaactaagaataatgatcataatttaggcagtgcttactttccatcctacttttgagacttcctttgaaaatcataagtgaacacagtgaaatgaaggaaggaattctcagttttaatatttataatttatacaacttttttatgaatagttatataccaatggccatgacaggtcattggcttttccaatataaggaaccttgtagagggagcatcaaatagtaaggtgaagttctacaaggcaaggaaatgccagtcaagctttctttgcttcctgggattttgtcccattgtttgatgattgctccaaatggtcagtttctcaaccaaatccagcacttatgattttttttcctgtctacgggacatgtgtagaaactcttcctgatactccctggaggcctcaatccttcgattgctgatcttaactaagcaagactcaaacatgtcttttcttaattatggttcaagactcctttaaaaatggaatccatattggtactttttagactaatccatgaactaatgaacttttggtactcctagctctaatgctatatttgagaaaaactactgcagaggacttttaagtctgcattagtgtagtgatcatcctctccaaacgttattcctgctttccctcatttctctatcatttaaccaacccaggcaaggttagacacttaatccatttaaatctaaacctctgctatcaccaaaagactatatttttggtaaagtttgtgtgtgtatatatgctgactgtaaacttaaaaatatacatcagtgtttttattgaagaaataaagagctataaaatgagacactcatacagcttttgacttccagatttttatagaaaagtaggtaggacctacaagtgttcagaaaatatgattagatttgctgtttggcatgcatacatttaacagatgtttaatgtgtatagtttcatttggtacagctgtcttggtatttcctgaatacttttaaactccttagtatcttttatttaaagaaatctggaactacatcagcaaaactgtctttatttttcatccgggcataatgatatctatataggaaatgaagtggcaaatcacatggataagccatacccatggaatgtctatatgataatagtctgcatttgaccacagattatttttattacttgatccttccattcccttgcacaacgccatttatttatgttaaaacagaagaagacaaagagtttcagtgcatttgcatgaattaattggatcctcagagaggacactgcagcaaagagcagatctcttaggatagcatgactaattcatatggtattttagtggcatcccagttgcagtgtgcacttggataacttttttaaacaacaaaattattctccctttgcccttattaatattactccctaacttcagtacagtagaaatgatgcttggtaaagattggtaacataaaacattttaagtaacttttaccagattttattctgaactttgttctcacctataaaacatatgtgggaaacgggcctggtgtggtatcatgcctgtaatcccagcactttgggaggccaaggtgggcagatcatgaggtcaggagatcaagaccatcctggctaacacggtgaaaccccgtctctactaaaaaatacaaaaatttagccggacatggtggtgggcgcccatagtcccagctactcgggagactgaggcaggagaatggcatgaacccgggaggcgtagcttgcagtcagccgagatagcaccactgcattccagcgtgggtgacagggcaagactccatctcaaaaaaaaaaaaaaatatatattgtgggaaatggaaagttttatctattgaaataacattttagaatgcagataatggcaaagggaccagttctataggaaatgtttacaacaatttccttgtttgggatgcctaaaaatcaaatatagtaggccagtgttagttgacaagaaaagagaatgactgaaaaagaaacaaaagttgcaaaagcttttacgccagctcatagattccacagttatgacattaacttacgaaatttctatctaaaatgctaccaattgtggtttgtaaatgcccctgcaggttttaaatgaaaaggacagaaagatcattggcctattcttgctttcatttgtttaacatcactgcattgtctcattttattgaaaaacctagcattaaactatagcatgacctagaaatatgtttcatcatagagaaatatagtatacaattaggagtatgggattttaaatcagattttctggatgaaaaccaagctttgttttttattggatgtgtacatttagacaagtactttaacctttctgggccagtttgttcttctgtacaatggagataaaatactgcctacttaatttatgattattatgagaaataaatgagttagcatgtgtaaattgcttagaacactgcttgggatataagaagtttactttcagcattaacttttaatgcttttattatcattgggacaaattttcctaaatgatgattttgatcagaatgtctttggttctactcattcttttttaaagtatttattaatttaaatacctttttgttccagaagtgattgtggcaacttaaaacaatatgtactgttaaaactggtgaatagaaaatgagcatcaaaatattgagactgaaactgatattcagtataaatatatatgccataagatcctgccaatcaaaattattctgcagaaccagcttgttctggggaaaacctactatcatattttatccatgatatttatgattttaagttgattaggaaccttatatttttttcaggacctgagttaaatttgttgttgtggcaacatttcattgctgtggttttaaatccatccccataatatatttttaacatttttaggtgctgttttttttctttttcactattctagctataactgcagatgctctacatagcagagaaagggggaaaaaaaggaggaggcacttgccaatgcaagttaaacaaattttctttcgtacatatatgttcaggtaataagcatagcttgatcattacaatttttttactcttcatagactcttaagctattataggaaattctattccattggttgttttccagtcttcacattaaaatttccaacttttccataaattttagtgtcatttatttagtattttgagcttgttctcaacttctcaagctgatcatgtaaaaactaaagttttgtttttgttgtaacagatatgcacagtgtaaagttggtacctttatcacttaggatttatatttgcctccttgtaccataaactagaaataacaacagcataagcaaggtcagaagtaaacagttcagagctagtacagaagctaaacaaagtcataaaaggattcagaaatcattctgtctttgtactttttctattcttagcattgacttacatcattaaggctacaaaaatgactgccagagctccagcaaagatatttgtgatgactgggggaagaaaacaaaaatccaaggaacaaaaggggaaaagaacaagtgtctgtcccacttttaaggagcactgttgatgatttcgcccaataactgccactctcatttcttggctatttccagctgggaggaagtcttgggaataatggcctgcatgtgtgtccataattcctaaaattaaatgggagctctattgataaagaaaagtacatattagagaggcaactggcaggttttgctataatctctaatttcttatatattctttttgataggtgtttagtgttctttttcttttttttcttttttttctttttaggggttttttttaattttagggtttttttatttttagggtttttttttaagttttagggtacatgtgcacaacgtgcaggttagttacatatgtatacatgtgccatgttggtgtgctacacccagtaactcgtcatttaacattatgtatatctcctaatgctatccctcccccctccccccaccccacaacaggccccggtgtgtgatgttccccttcctgtgtccaagtgctctcattgttcaattcccacctataagtgagaacatgcgctgtttggttttctgtccttgcgatagtttgctgagaatgatggttttcagcttcatccatgtccctacaaaggacatgaactcatcattttttatggctgcatagtattccatggtatatatgtgccacattttcttaatccagtctatcattgttggacattttggttggttccaagtctttgctattgtgaatagtgccacaataaacatacatgtgcatgtgtctttatagcagcatgatttataatcgtctgggtatatacccagtaatgggatggctgggtcaaatgctgtttctagttaaagatccctgaggaattgccacactgacttccacaatggttgaactagtttacagtcccaccaacagtgtaaaagtattcctatttctccacatcctctccagcacctcttgtttcctgactttttaatgattgccattctaactggtgtgagatggtatctcattgtggttttgatttgcatttctctgatggccagtgatgatgagcatattttcatgtgtcttttggctgcataaatgtcttcttttgagaagcgtctgttgacatccttcgcccactttttgatggggttgtttgtttttttcttgtaaatttgtttgagttcattgtagatgctggatattagccctttgtcagatgagtaggttgcaaaaattttctcccattctgtaggttgcctgttcactctgatggtagtttcttttgctgtgcagaagctcttcagttgaataagatcccatttgtcaattttggcttttgttgccattgcttttggtgttttagacatgaagtccttgccatgcctatgtcctgaatggtattgcctaggttttcttctagggtttttatggttttaggtctaacgtttaagtctttaatccatcttgaattaatttttgtagaaggtgtaaggaagggatccagtttcagctttctacatttggctagccagttttcccagcaccatttattaaatagggaatcgtttccccatttcttgtttttgtcaggtttgtcaaagatcagatagttgtagataagtggcattatttctgagggctctgttctgttccattggtctatatctctgttttggtaccagtaccatgctgttttggttactgtagccttgtagtatagtttgaagtcaggtagcatgatgcctccagctttgttcttttggcttaggataggtgtttagtgttatttttcaacatctgtttgagaaggtgctattgccatttttaggcaataacatcccagtttagctttcttaactgaaagaaaatctcctttacttgtttacaagaagtagggatgttaggattttcttacattcttagatccaggtgggaggcagcagtgattttaagagtaccgacaaggagggcgttttcctgcttggttccctcagtaggataaatctgttttaaaatgtgccagatagatggtattatttttgtttgtttgtttaagacttcagtgattcatcactgtaaaatcctgaatgatgaggaagagcagctctttttatgtaaaaagagagaaaaagtctgttcacagtaactttcatttaattaagtggtgctttgttaccttggtttaattttgaataccaggggattagaattcctagtgggaatcaggcagctttcacttgtgtagttagccagttttatcagtagtggaaatatgaaagtaagcaggcaaagattgtacaagcctagcaggtagcacaaggtgagatttgtaccccacattgtctttatgcgtgtttctcctttattgcatcatgaacctagaaagtagtaagtagtctgttgttttcatacatagccaccgaggttacagattctttaaggcaaggattttttatatgatgtatttaatgtgccaggcttttttaaatgcttctgttgcattttcagggaaccatttgtatattgctataaagaaatctgtctgaatctactgtatattaagagaagataattacatggtttaatgactgcatctacagggcttttggcaccttgacaggtttttgcattagtgtaatgcaatgcaagaaactcctgcatatttacagcaaaacagatattgtgccaaggcctctagccataactgaagttcttatctgagaaggcagcgtagtattgtggtttaaagaatagatttgggtgtcatatgcacctggatttcagtcctagccctgctacttgggcaagtcataacttcgctaagccttagtggcttcattcatacagttaccaagagaataaaaatttgataatacattgtagatgtctccaatggtactttgtccttattaatcccctgcctttgagtctcggctggactgagtgagattgggctattaaaagattgtggcttctgtcttgagtgctctctcactctcatggtgcactcttgctttctttcatattctcttggattgcttattttgggggaaaccagctgccatctcattaggcagccttatggagaggctcacatgggctagattggagctggatattttgaggcctctcaacagctactgagtgggtttggaagcagatccttccccagttgaactttgagatgactagagtcctagcctacaacttgattacaacttcagtaaagaacatgacccagaggcactcctgtaacagtgcccagtttcttgacccatagaaactgtgagatgataaatatttgttgcttttcattttaagccactaggttttgggatgctttgttgcacaccgatagataactaatacagcacataaagaggtcacctgtgcatagcagggagcaagtactaccaatcaacaagtattaacagttaaaacaagaaaaggtcagacttaatctagcattataggattatttgtcatgtaatataaagtaagtttccatatgtgtgtgcaaagaaaagaataagacttgtggacagtctctcttgcttgtttctgtagattgaaacacaaagtgaaatatcaatcatttgagaatttaaagatagtataggaagacaagaacttaaaggtcatctaacttctgctaatattaggtttaaattgttaaaggtcaaaacaaaaggaaggatacatagtaattgacagatattgttctttagattgaaacaataggattgctaaaatctataaaagttgaattgataaaaatacagcagaagttgtgtttgttacttcagcagtaacctaaatgatatatttgggatccctatgttaatttaatttagaaaagactatccaacagattgtaatatttttattatatcatgatcttgaaaaaaaagatataggaaaaggtttttcattgttttggagcatgtaatcaaattaggttgaaaaactttatgtggcctgttatattaagataagttagcctgccttgccggaatcaattcatcttatatttgagataaattgtttatttaccattgaactctataaagtaggatgtggaacatatttattaatatgtaaatatagccttatggatcagaaccccaagataggatttctgtgcagctactatacaatattatccacctttgcttttctctaaaattctaaatctatggcttttgttttttaagttgttttggaaatttttagattttctttggaaattgttggaaacagttgttaccagaattattttcttttcaaattcattaaactttacatatggaaagttatagtagattctgcccagatgatttcttgaagagcaaaaatgagtatttccatttcccagtggattatttggtagtttggggtaaaaagacagaactatgcaaatacgatgaacttactttagatgactcaaaacagagaatttacttaccaggcatctttaaaacaaaagaaaaaaatagttctttagttgtggtcaaaaggttttaagactctttatacccatttttcatgctctaaaagagcatctgtaattcatcttgtgcatgctgggaagttacacagcttctttatatgttgacatttttgaactatctaaatagatagatgtggaatatactctaaagtcaagaagtattctcaaagaataggagacaggaactctgatttgaagtcttcatggaatgcgaatgatggctttgaatgttgtggtgaagaggttaggcctaaattttctgacgttcaaagttaaggcacccagcactgcgttagttcaaaccactggccagattatgttgaatattttagagtccaaattattcttaacatgtattttatataaaactattatcctgaaattggttcagagtctctttcagtgattctgagaagttcatagaaagtgaacatttttaatcctccatttcccaaacttacttgacttaaaggtattttttttatttttaataagcaggacacatgctgtacagaaatggcattttgtggaacacgttgtaagaaacactactctgatatatgaggaccttaacaatctggaaaataactgtttgtttcctagggctactgtggcaatttacaacaaactgaggggcttgaaacaagataaatttattttctcacaattctgtaggccagaagccccaaatcaagatgtcatcagggccatgctctcaaaggctctaaggaagtctgttccatgcctctgtcttagcttctagtgattcggcctccatcttcacatagacttctcctttgtatctgtgtctctgtttctcttcgtgtaaagacactagtgattggattgaagccctaccctaatccagtaagagcccatctcagtttacatcttaattacatcagcaaaaaccctatttccaaataagctcacattcacaagtgtgggggtaggacttgaacatatctttttgggggacacaattcaacccattacaataattatctgttgaatcgaatatcccactgttctcttacaagatcatgtgctagcaagcttgtgcaacccgccttattttgttgtttttgttctgttttgttttgctttaggtttttagcagcttgaagccgtggtttttagtttctgtttctagtgataagcagaaaagagcgatggggaagggactttactggcccaatcagaaacagaaactaagaacccatgactgtattctcttccttggacatccccgagtgtcccaggacttagtcctgtaaccttttctcttttatccactttcattccctaaatatttttatctgtgctttaaatgccttctatatggagatgacgtccacgtttttatttcaaggcctgatatctcccctgaactgcagacccctatatctgacatctccaacatgtctgatgagattagacaaatttatcatgtctgaaacaaaacagttttcctctggccaactcactccagctccagtctatcatatctcaggataggacactattattcaaagaatcgccttttatttctcttttcctttcatctatacttccaatccatcagcaactcaagttggtcctgtcttaaaatcctaaacctgaactgttcttaagccaccattgccaatattctggtcaaatttatatcttttccagactgaaagtctcctagctggcttttcttcttccactcttgtcccgctacagtctgttttccacgtaataatttgtacgatatttttcaaacaaagcatggtcatactcctgctgaaaactctccaatgtcttcccatcaaactgcaaacctttagggccctttatgctctggcctccatctacttctctgatctcctcccctaccagtctcctccttggtaattttgctccaatcttaatggatttcttaccagttctccatcaaaccaagtctgcaccccccttttggagttttttccttgtgtttccagctaccttgagaatttctttccccatgtttttagatagctcccttcttgtctcttttcaagtctcttaattaccaccttctctaagtggtcttctctagtcactttacccatgagtggatttgctggatagccatcctagctctttggaaaaatgaagtcatttttaagcattaatttaaaatatgtaggagtgtaagttggaaaagtaacattgataaaggtagatgtaacatgttcacatttcttagtgtattttgttggtagaagctcaaaacattgaaagtgcaattagtactatgtgtatttgacacacacacacacatacacatacacacatatatatatttcaaaacaatgaattatatctttttggatgtgaacagtcttcttaataaacagtccaattaaaataagccagatgtgtttgtaattgactttgaatgttgcactttagaccaatgtaaattcaccatcatattgcattttaatgactggcaaataaaaagctaaggtcaagagatgttttatttttcttttacttttgcaatggcatgaaacactcatgaaagggtaaatctaatacatgaaattattaagaagacatgctatttccccccacaagcttaataaaattaaaaattttagtaagtagtatgcttctaaaaggctttcagcagttataccagcaaactgaagcctagttgtctatttcagaaacttcagaatttccagatttttcagatatgtgtaagagctgaatagaaattaaagcaacagaaaatggaagagaaaacaaatcggttagagctactctattatgaagagatttttaaccccatatcaaaaaaatatttgccaccactactctggacataatatttttcattactatgtcacagaatacaaatctttgattcactttgaaatgaaagccacaaatacagaactaagtcccataccttaaggagcaaaaaaggtgaatattttgccaaaattcttctcgcctcaataaaggataagaaggtcatgcctaataaaacagtaactgttgaaattcaggaatttgccaagaacatcagtttgatgtatttgtttcaaagagaggaattcaacatccttataagagaaaggttgtatgtgttccatcccacagccatgatctatgtactatgcccaagaaggacccacaaaagtggaagctcagctttgtgatggcccaatctctgttttcctcctcatacagtatcggttcgccttgttgcttcttaaagtattgtgctcctgtttatttaaaggattcttactttcagagtgctctggggagggagtggtaaagatgtgaagtgagccttggcagctgcctaaaaccaaaaccttcatgcctaccatcttatagtcagtaattccttggtgacatctaacacaagcaagagaagcgtgtggtgtgtttaaacagaaatctatcaaactttttttgtccttatatatatatcctcttaaaaaattacagaaatactccttttgaatgcacaaattcagattattgttacttagcaacagaggttgaatgcttgttacacattgtgaaattgtactatattccctcaaaaggagaaaagtttctcatttatctagcttctaaaaattctaagatattaagtcatatttgtttttaatgtatctcctgattgttctgggcgatttgtgaaggattttgaattgttaaagctagcacatatgttatatgtacacaagttatgaagcataatagtaaaacaaacacccatgaagccacctccaaactgaattacgtatctcatcctgccagattcatcctccaaatacaactatcctcagttcagtttttattgcattgtttacttaccttaaaaagaaatgggtttttgcctacttatatgtctcaaaataatataccgctgagttctgcttatattttgtgcctatgataaaagagttatgagactatctgtagtctggtcacttccttcttaaactcagttttcttacaaatgcccactaatttatattcttctgaaatattttatattggcaatatatgttatattaaggtttattataaagctgtagtaattaaaatagcattacatttgtgtagagataggtgaattgttcaagggaacaggatggagagcctaaagacaggttcctgcatatatggaaagctgatttataattggaggtagcattgccaactacatattctttggctcatacaatttccacaagctatactagcacgtgtatacagaggtctgtgttgaaggatgttcattacagccttaattataatagccaaatattatgaacaatcttaatgtctgtgaatataatgctttagaatattaaaatatctgttacatatattataactataaaatgaaaactatgcaacggtttaaaaggaaaaaaaaacaagagacactgatcctctataacactgcagttgggactgataacttagtatactctctgggaagaaatttggcaatatgtatcacaatttacaatatgcagatgtgacagatttcagtaccttgaacatcttttgaagggtgtgcactcaggttgtaaattttattgcttgaaaaacaacaaaaaagttagaataaacttacatgtctgtcaatgggaaagtagctaaataaattatgaaatacagttaagcaattttttaaaatgagatagggaaaacttccagtaatggcaatgaaataaagtgattgtgtggaccctctcaaacttaagaattataaggattataagatgtggaccacatatttttaaaaacccatctttaaatgcttaaaaacatccaaaagtagacagaaatcactggagaatggactggaactgagtattggtatattcttctgtactgtttaatttagaccaagtgcaaaatagttttagaagctgaaaatacttagatttcaatctgttttacatatattaaaatgaaacttttaaaactatgactttaatctcccatgtatcttttagattaggttagcatgctttggttcttagcattaaaagtacatctgtcattttccagtagattgccttgtttgattggggttatgtatcttgattcactcaatctcagcaaatatttattgcttgtctaacatgtgccagaccccctctagatgctagggataaagtagttagcaagacagacaagatttctgcgtacctgggtcttacattctaagatctcttttgtttaatagtcttataagcataaggtatgtattcacctgaaggtatcatccagtagaggaagaaggaaaaaaaactgtgaggaaaaatgataagcagaaatcttacttctgtatatataatagaatctccgaatattggaattgaagggattcagtatagttcaatgattttacaggagcattttgctaaatatagtgattctgtttgtttaattcttagaatatttcaatattttagtcatccaatttttcagccattttgagtatagtagattatggaagtatactttaatgagaattattgttcaggtttgcctttgtgggggatgcaggggcttgtgagaagaatgacaacttttacataagtatgacaagtatattatgaaatggaatttatttgtcttttaattcctccattgttctgtaacctatagggaatgtgtttgcctagttttgttatttttaccctatgggcaaattttttagggccaaaaagtttgaagcttttcttcttatattcaataatgtttaccatccagagagttctttattatatataatccaaatgatttcccttactaaccctcttgtttcgtttaccatatgagtttgctattgaaatattaaaacatcctaataaaacatctctaccttagccaagggacaagaacaaaaaaagtttcaacagtatcaaatattttgtgtgttgttttatttttttaaaacagagtctcactctgtcacccaggctggagtgcagtggcgcaatcttggctcactgcaacctctgtctcctgggttcaataaattcttttgcctcaacctcctaagtagctgagattacaggtgtgcaccaccatgcgcagctaattttttatatatttagtagagatggtgtttcaccatgttggccaggctggtcgcaaactcctgacctcaaatgattcgcccacctcagcctcccaaagtgctgggattacaggtgtgaacctctgcacctggcctcaaatgttttttaaagcatacttttccccaaaactttctctaatttcagcaaattgtttatctcctcccttataatttgttccactaaaccctgtgtatgatgtgattatgctgtgtttctgtgctatgtacttattttgttacttgtatctgtaatatatttgtggatgtttggttgcgtatatacactaagaactggcattttaatactattttatgttttctgaaatcattctgatcaaatgtatgatatttctctaataactgagtaacaacatcagttataaaactataatgattatcatctcatcttagatgatttaggccagaaagagtgactttactgtcattcagttgaaagtactatttgatttcctaaattgtctcatctggaaagttttttctagtgggcttcagagacataatattctttatccttcaactcagtatttttttttctctttctctctctctttaaaaaaattaaacagctcgatcaagtcatccgccaaagaagcctgtccagtttggaactgttcctctcctgtgcacagaaacagttaagtgctttaatagctacggaaccagttgacattgaataaaaagaacatgacaaacccacactggcattggataaatcatattacaccttcaaaatacacactctgaattataaagatgtgtttgttttctttccaaatcatgtagaattgatttccagttcaaggataaaccaaaacaatatttagaactatcaagtgatctaatttattttcttttggtttcttctttacatttactgttattttattattattagtagtagcagcaacagagtatgatatgacccaaaagccattgtaaagtgccacattaccaaaattaattaagtaaactttatagcctgtgggagtctattatatattattttgcaaaagtagtaaatatattattgtttcatgatgactcttgatgagatgctagaatgtaaccatacatttatcttattttgaggatagaaatagcatggatttcaacatcacttatttatctgtataattggaaataaaacaccgatatgatagagaatcattccggcattacctaacctcttctgcagttggatctatgtattttcattggtctactgaaaacaaacaatacaattaaaagcactaaagattattatattaattcaactttgatctgatatatcacttaaactaaaggggtgtgtgtggtgtatgcttgtttcctatttctgctctttaaagatactttgaatcaataaaaccattagtctacaaatcaaattgtgaacttaatctctagaaagagaatataactcagccatttataggaatttaggttcaagtacaggatatatgaaatcttttcccagtatttcagaatgtacttaattcacaggcaggatgcttcaatgcaaaatcatgaatatttttaattcaaaactaaaatgtcattaatatgtatgtatgcaaatgttttatcttattttctgaaatgcatctactttcatgggctttgtacgtttctgagatttctcagtgtaataaaaagagctcccaaacttatttggttgttactttttgtttttttttaaatttctttaaaaaatatattttatttttttttagaatttttctttctcaagttgaaattttctatcctaagtcgttttatcactcgaatattttaagaacaagactagccttccttatagacctgcttggccttctagccctgctaaattttaattgtagatccttagacaagctgcctaactagttagttagacaagctgcctaactaatttgagtctcagttttctcatttgtgaggtagaaagagtgatttttataggctattaaaaaaataaatcttgtaaagtaccccatatagtgcttgctggtatagcctccagtttataataatttccctttctctggaaattaatcacaaaatacaggtgtgagtacctacaaacaagtggctaaagcatagcattctgcccctctaaccttgactgactgacccacaggtgaagacctgaccccaagtgggcctcttatgaaaagtcttatggtgacatcacttcagcttccttaccatagggagacagacatgaacccctatttctgaggttagaggtgaccccaaccctttttttcctgagtctcagattctgtgagatacctgaatattcttccaatatgttatattgaatattccaatattcttccacttaacttttttcccttaagctagccagagccagtttctattatgtgcaaccaaaaaacattacccaaagcagtcaagcacagatcccagcaagtaatccctggatacttggcacttgttggcttctcatttcctctaccgtaccaatccgcatccaaaatgggaacactctttgatttattttaaggaatgttaaaaatataactgaaccaaagcctctattgtctaacaaagccaagtaaatcacagatacccaaaactatgaacaaacagtgccctatttaaaagctttctgtcactcagaatctagagtagaggtttaaactcagctttgctgaatgctgactcacgttccatttcaaaggaggcttactcagtgattgctttgaaatcaaaaccagaacaatgtccctatgattggtgttattcttcagtgagtcagttatctattattataacttctttttttttatctgacaattaaactgaacggaatcaggaaatgttctctatatttaaaagagtaatacatctgaataataaaaaatgtatatataaacctggaaaatatttataaaactcccaaagaaaaggagactttgatcaaagcactctgcctctagtcttctgtttacatactagtaaacagctctgccatatctccaaagactctgctaacaaaaagcagaaagccaatgtgttctgaatccacaggctccttacttgtaggcatcaccatcagcatcacagtaagtggatgttatcactatatatgagagcccacagttgtgactgctgggctctttttttaagccaggcaaaactaaaactgttctctgaatttaactgataaacacatttttagcccacccagtcccccataatccacaggctacttgctcaccaatcattggtatatataagtagaagggaaagagcaggtagaattttctttgatctggttttgttttcttaccccaccttaccaagcattcattctcaacaagttgctcccccttaaattgtccccattcctggggtcactatatattgaacttttcctatggagtacttatataattaaataatgttttaattgttatttataattaataatttgtgtttttatttatgtctgcctcctcctaagcagagagaccacatctgttttgtttgttatatcaatgcatttcatagtgcctagcctgtagtgaggacttagtgtataattgagttaataaataattgaatcaatcaataaaacaattattgcacctgcaatgtaattaaccaactaattcccagctaatagattctgactaccgctttaaaggatttagctaaagttgctgtgtttctgaatgagatcctgtaagaaaattaacgctcataaaacagtaaaacctactttctatataaatcagtaaaatttctgaaaactctaaaatgaactctgcatttccaatgatactcaaatgactaaatcacattgattgaaatgtgctacccaaatttagaagatcctctaaatataagtagggaagaacatatgggaaattatatgtgaaatcatttcatatggtgctgagttgggcctagctacaagagtaaacagcgtctgcttgagagggccatagaacagcattaaacctactggtccgtcagtttggagttggaacacatagggagcaacaacatttagaggacagactgagtgcataaagttttgtgatcaagagtagaagattcagagggcccagtggaagttatgtgtaaagagaggagaggtgcttaagattgggtcagatcagggaatgtccagagcagtgtatgagtcctggtgataacgatgccaagaatatctgacagtatttttcaattcatttctgactctgaattgtgatacagattggccttgttgtgagaaatacacagaaatcaagaaacaaacttattcaaaaggtaggaaaatttgactcagtcctggcaaacattcggttctcagaagtctggtagctgatttaaaaagaaaaaaaaaatgaagccacagaatgtacaaattgctgacttcaacacagctcagatactgaaaatagatagtagaagatttcttgtgacaagatatatatgtaatgaattttgagttttgtcccttttattgaggtacttttttctgaaattgttacaaccactaaacagcactacattttttgaaacatttttcctatagtattttttggttttttgcctgattagctgccaaatgtaaatgtttaattcaactctacaaaaatgtttaacacttagtgattcaattagtaagtttatacctatggtctcagtgagctattctttaaaattcattatatgttataattttataggcaaactaatatgtttttatgattcttggctttttatagataaaaataagcaacaatacatgtttttcttataattttctctttttttcttataaagcaggaaaaaacttctatattctgtgtcagttggttgcagttatagaaaatgcagtaaactaggtagaaatatcaaataagatttttataaaactggtctgtatggttccaagcaatccagataaataaccagctacggtcattgaagagtaagatgtattcacttctatgtgaatgaattcaaagtgcaacagtgattctacttaatataaatcctttgatatactggcatttccgcacaggaagaatacttgtgttcagaaatatgtgttttatgcctattccttagaattttagatgcatattctcaattatacatattaaatagtccacagagaaacctaaacttctgtaaaactcataacgcagtgttatttagaccctaacctcaaatgtaacaaggatggtaccctcattatttttttattccctctttctatgtgattccatggctttaaataatctccatgtgctaaagaccaccacatttgtagctccagcccatttaagtgcagagtcctagattcagctgcctacttgatatttccacttagatgtggtacttaacatatcaaaaacagtattcttcatcctcactccacctctgccacccaaattcttttctcatgtgtgtcttttctaatattcctcatctcagtgaatgtcagcatcatccctccctgcttcccctccccattccctacaccaaactcagtcctgtcagctctactcaaaatatatcctgaatccatctgtctttttccattcattctgaccactacctaccaaaccagtctttatgatctctagcctagacttttgaaatggccttctaaaagagtacttgcttccattcttgcccccaagtattctgtattatagccaatgatctcctaaaacctaaatttattgaatcattgtaaatgtaatgtctttatggtaaaatgtattcattgtctcattctgattccaggaacatatacaatatagtaggaatagatgtaagccatttgttgtgatgtatgtcactgaggcagggatgctaacagaatcaagtctgcagatgataaaagttcaactgagttgaagaaagggagaaagtaaatgaatagttaagagacatgcaaacctccattgatatgtatgtaacctcttgggagtcagctggcttctttttcttccccttttcttctgtatgacttaaagtttgacctgcctgcttctttctactctactgttagttactctcaaactaaagtttctctccttgaaagtttacttgggaacagaattcagtgttataaatatccacactctcgttcagttttgattaagagttccatttgtgatggtgagaaatctgggagtaaaaaaaggactccttcctgttgtcttttcctctctggcccctttaccttttggtgaatcttttcatacagaattgcatatactgcaaaagaatatgcagcttcaggctattcttgacattctctgactgagttggagtgtcgagcaaataggagcttggtacagggtagttaaggaaaagcccagcagggcatgaaggcccaacaacatgtaactagcctcactggccatgaaaagtttactcttgtctcttcttctccctgctgtgtgacatcaccaattctgtcatcatggcaaacactgaccaagaaataccagataggaagcttaagtaaaatgggaatggggtcaagagggagggaaaattgcaaaatccaataaatcttaaataagagcagcaggaaaggaaagggccattttattgcctaaaaccacctggcttttaggtaacagttccaacatgtccttttttgaatagctgttctaattattatatattcagctgattaataggagtacttgataggtggactgtgtcaggtagcctcaggcaatcctacttcaacaagctgtcagggagccatgccatgcttctttatgacataggtgaatttgataggctcactagcagaacatgggatcacaaggctggaaccattccatttccatgaaataatttaagtaagccaatacaaggggaaggggtgggaataaaggtctgagatggtctttagttttacattttgtgctagaggtatttttacatacttttaaagaatagagggtgcctgtatcttagtacacttaataagaaagaaaaattatactgtaattgggtatcgtcgttgtcaatcatttggcaatgttacctgataaaagtttctgagatgatggaaactctctctatatgcacggcccagcttgcttgctcctagctacatgtggttactgaacacttgaaatgtggctagtgtgacagaggacactaattaattttattttatttaaattttatagttacatgtgactagtggctactcttggaaaatgcaaatatagagattcccttgccagaggggaagcagtaaccaagttatttctcctaatcacacaaacacagttacgtttgtttccttccacccctcttaagattggtgtgtagagtaggcatgtcatgagtacaaatgcatgtgaaacacttcaagaaaaaaagaaagctgagaacccagtgctgttgatatattatttaattgcataatgcgtacagattaaaggagaccttactggaaaactttctagtgtatgattcttagagctgggaacacttctagtttagtgccaccaagaaaggatttctctgatcttcggccaaaattatcctaaaaatagaaactcgtctatttaaatttgaatttctgccttggtttgtttttgagagttgcctggagaatcattatgaccatagttttaaagattaagcagaaaatgagtaactgcatataaagattcagacttccaaaatggactttggggaatgcaaaataatgtctaattattatgcctttgaaattattttacttacaccaccgcccccccgccgccccagtaattgaatttgttgagaagtagcttttcgttttaaaaaattactgagcttgaattataccatgtattgtgctagtcatattacaactagtgagtgcctttaacagttctgtgaggtagatacctcctattaaagaagaggaaagcaatgcttacagaggctaattaacttaccaatgatcactgccggttccataccaggtcggcctgatgcccacgcttttcacaagggcaggtattgccttttgcaagtaatattcacctacttttttaaatttagccacgcattctgtttggattcacttttgtaatatatctcccaccaaaggatgctaatgatctttctcagcacaagctccaggcacagctttttgacaaccagattatgctgagtggtatatcaccaaagctgcactaagccctctggcttgtgaggcatcagaccagtttgtatgctggtgggacaaaactgtgggaaaatcatttcccttctatgccaaatttcatttaattgctattgtttacctagtgggaaaagacttatgttccacagctcaagaaaatcaatcctacttcaatacagtgacttaacctggagttacattagcttaatgaaaaaaaggcctggctgaaatataaaatcaagaaatcaactataatttagctaatataatgtaacaataaaaattcttccagaagattaatcttccccaaagctctaatcaattcttaaaatcatcagtccaaatcagtaagtcagtggcataataagcattataatcttaacattttcaaagaagaaaattgaaagagtgaataaagtaatttcattctgtcctaaattttattcaaagaaagaacataacacaaaacctgaaactaccagcttctttcctcaaattttacctattcattgaaactgatacagctcatccatgatatcagcatgggaaaccacatcacatattatttggaaatacataaatgagtattgttcccattgcaaaacttagagatttgcgttcctccctttcataacttaccatagttcatccagcatggagccagcctccctggttcaagtctcaaggctgtcatttaccagcttaacatataagatctccagtgcctcagtttcctcagttttagaaagacgacaatagaatgtacttcataagattgtttgagtgctaatacataaaaagcaattaaaaccgtgtctggcccgtagttaagagtttatgtcctgtattcataaagaaacagtggctgtttacatcatccttacttttaaatttgtcactatttttgttaatatttttaggattgatgatatattattttttggcttttaaaaatatgtttgggctgagtgcagtggctcacgcctgtaatcccaacactttgggaggccgaggccagtagaccacgaggtgaagagatcgagaccatcctggccaacatggtgaaaccccggctctactaaaaatacaaaacttagctgggcgtggtggtgggcacctgtaatcccagctacttgaatccggcaggcggagggtgcagtgagccgagattgcacctctgcattccagcctggcaacagagcgagaatccatctcaaaaaatatatatatgtttgttatactgattcatttgttctgattgacagttttctgttaaactgtgtcttactttatttgaagaatgtttatgatctatcatcttccagcgagatgttctgttagcttctaagtaagaagcttagaattctgcaaaacattttcagagagggtgcataaaaataatgctttattgcatgacttttttttttttttttttttttttggtggcagcaaatatgttgagaattctaagatgctctttccttcagtggttatctaaaaagtgttaaactgtgagcatctgcctggcatgcaaacttcatgttttactgttgtgattatcccaggcagcagatcacaggtatgtttaccttcaacagacttagtcccttaatttcttccctgtcctccttttccttcttccccagtctgctgaattcctgtctgctatgaagagtggtgacaaatactaatctgaactagaccacagtcatataaagtcagattgaggacttggccttgtatcaaacctgaagtggaggggaagggtggaaactgctgtcttgtaaatagccacccagggcgtaagccctgaaaacatgtaaatatcactatgtcccatatgcattatttctcaattttgtcatgctacctttgccagctagtttaactgagtatgatttacagttattttattgaacattttttgacaatttgagtacagttctggatgtaatattaaatcctcttctggctcagcagattgcaaaattgcacgttctgtctacacatcaaatcctaggtctggaggggaattgcagactttacctagtccagtacatccagaaaatactgcgtttgagcttttccatagcagatggtatttcaccctatcctaaatgacatccaaacaagaagattgatgatatgattaaagactgtgaagaaaggttaaaattaagcttggcttctgtttcttttaaattcataaaattttttcttcttcaaggatctctagccaattccaatggctgagccaataagtttaatcatacctttatgactgaagaggaaactaaatatggtaaataaatgttaacaatttagttctaaattgtttgtgtcaactttatatatcaggtttgagattgatcagttttttaatctatctggaatctggtgttgaaaagtcccagaaataaaagctattctaaagaagtttcagaaaatcaactcaattcttgtaaccttcatacccgaagactgagtaatttataaagaaaaaggtttagtagactcacagttccacacgcctggggaggcctcacaatgatggcagaagacaaaggaagagcaacgggacttctcacatggcagtgggcagtagagtgtgtgcaggggaactcccctttataaacccatcagatctcaagagatttatttattcactatcgcaagaacagcacaggaaagacttcccacagggtccctcccacaacatgtgggaattatgggagctacaattcaagatgagatttgagtggggacacaaccaaaccatatcactcttttatagatattttgctatgaccagaaaccaaagctttgcctacatgagtttacgttataattacattacattataatatttttctaagaattccaagaaaaaagtgtaaatggtccaaggaaggaaaatttgctttttgtcaaactcccatttgttgaatatgatatatttagcaataaaatgaatatttggctcagaacaatacattctaatcagctttccattgaacatgccatcatcacagtttctgtaattatttagaattctttattgagctataattgacaaaggaaagatagattgcattaaaatactagatacatggcatttaaaagttgttttaaaataagttccccttgattttaacgtaagctttggttaggttaaataaaatgttttcaaactcagagttcccctctgtaatcagcatctaagatctgatgttacttattattactaaggagtttcttcaacaattcattttttatgatttctccaccttaaaggcttatgatactgttatgaatttcataacattatgagatctctgcttctgggacagaaggatagattgatcctatttccctactccatggcaggtaggtggagcaatgccacgagcactgtggggctgcaggcagagtgatgtgtatcatgccaagccaaaccatttatttactgctgccagac

SEQ ID NO: 1108 - DNA, 2611 bp, Homo sapiens
cgggggcagaggtgttcgaagccgggtggtgcgtgggctaccccaacctgtgtggctgggccgcggtctcccctcaagggcctggggccgtgcctcgggtgtacgcgtaggggtctgtgtgctgggggtggctcaccgggcagcgtgggtgagcggcgcagcggcggcagcggagagcgagagaggggagcaggcttctaaccctcctttatgtgactcagagaaaggagacctcattccaagttccaggattaattctggtgctatacgtggatgacctgcttagttttaatttttggagaaatacattttataaaacattttcatcagattgctaaaattgtgccacttgaagaatggatgatgatgattttggtggttttgaggctgcggagacttttgatggtggaagtggtgaaacccaaacaacatctcctgctattccttgggctgcctttcctgcagtatctggagtccatctttcaccatcttctcctgagattgtactggaccgtgaccactcttcttccattggctgcctctcttctgatgccattatttcatcaccagagaatacacatgcagcaaatagcattgtgagtcaaactattccaaaagcacagattcagcaatcaacacacactcatctggatatctcactttttccattgggtttaactgatgaaaaaagtaatggaacaattgcccttgtggatgattctgaggatcctggagccaatgtatctaacatacagcttcagcaaaaaatttcaagtctggagattaaactcaaagtatctgaagaagaaaaacagagaattaaacaggatgtggaatcattgatggaaaagcataatgtcttagaaaaaggctttctaaaagaaaaagagcaagaggccatttcttttcaagatagatacaaagaacttcaggaaaaacataaacaagaattggaagacatgaggaaagctggtcacgaagccctcagcattattgtggatgaatataaggcactactgcagtcttcagttaagcaacaagtagaagctattgaaaaacagtacatttctgcaattgagaaacaggcacacaagtgtgaggagttgctaaatgctcagcatcagaggctccttgaaatgctagatacagagaaggaactgttaaaagaaaaaataaaggaagctttgattcagcaatctcaagaacagaagcttgaaaaagaagcagtgaaggatgcagttttaaaagtcgtagaagaagaaagaaaaaatttagaaaaagcgcatgctgaagaaagggaattatggaagacagaacatgcaaaagatcaagaaaaagtatctcaggaaattcaaaaagctatacaagaacaaagaaaaataagtcaggaaactgttaaggcagcaataatagaagagcagaaacgaagtgaaaaggctgtggaagaggcagtgaaaagaacaagagatgaattgatagagtatataaaagaacagaaaaggctcgatcaagtcatccgccaaagaagcctgtccagtttggaactgttcctctcctgtgcacagaaacagttaagtgctttaatagctacggaaccagttgacattgaataaaaagaacatgacaaacccacactggcattggataaatcatattacaccttcaaaatacacactctgaattataaagatgtgtttgttttctttccaaatcatgtagaattgatttccagttcaaggataaaccaaaacaatatttagaactatcaagtgatctaatttattttcttttggtttcttctttacatttactgttattttattattattagtagtagcagcaacagagtatgatatgacccaaaagccattgtaaagtgccacattaccaaaattaattaagtaaactttatagcctgtgggagtctattatatattattttgcaaaagtagtaaatatattattgtttcatgatgactcttgatgagatgctagaatgtaaccatacatttatcttattttgaggatagaaatagcatggatttcaacatcacttatttatctgtataattggaaataaaacaccgatatgatagagaatcattccggcattacctaacctcttctgcagttggatctatgtattttcattggtctactgaaaacaaacaatacaattaaaagcactaaagattattatattaattcaactttgatctgatatatcacttaaactaaaggggtgtgtgtggtgtatgcttgtttcctatttctgctctttaaagatactttgaatcaataaaaccattagtctacaaatcaaattgtgaacttaatctctagaaagagaatataactcagccatttataggaatttaggttcaagtacaggatatatgaaatcttttcccagtatttcagaatgtacttaattcacaggcaggatgcttcaatgcaaaatcatgaatatttttaattcaaaactaaaatgtcattaatatgtatgtatgcaaatgttttatcttattttctgaaatgcatctactttcatgggctttgtacgtttctgagatttctcagtgtaataaaaagagctcccaaacttatttgg

SEQ ID NO: 1109 - protein, 418 aa, Homo sapiens
MDDDDFGGFEAAETFDGGSGETQTTSPAIPWAAFPAVSGVHLSPSSPEIVLDRDHSSSIGCLSSDAIISSPENTHAANSIVSQTIPKAQIQQSTHTHLDISLFPLGLTDEKSNGTIALVDDSEDPGANVSNIQLQQKISSLEIKLKVSEEEKQRIKQDVESLMEKHNVLEKGFLKEKEQEAISFQDRYKELQEKHKQELEDMRKAGHEALSIIVDEYKALLQSSVKQQVEAIEKQYISAIEKQAHKCEELLNAQHQRLLEMLDTEKELLKEKIKEALIQQSQEQKLEKEAVKDAVLKVVEEERKNLEKAHAEERELWKTEHAKDQEKVSQEIQKAIQEQRKISQETVKAAIIEEQKRSEKAVEEAVKRTRDELIEYIKEQKRLDQVIRQRSLSSLELFLSCAQKQLSALIATEPVDIE

SEQ ID NO: 1110 - DNA, 2537 bp, Homo sapiens
aacttccgggggcagaggtgttcgaagccgggtggtgcgtgggctaccccaacctgtgtggctgggccgcggtctcccctcaagggcctggggccgtgcctcgggtgtacgcgtaggggtctgtgtgctgggggtggctcaccgggcagcgtgggtgagcggcgcagcggcggcagcggagagcgagagaggggagcaggtgccacttgaagaatggatgatgatgattttggtggttttgaggctgcggagacttttgatggtggaagtggtgaaacccaaacaacatctcctgctattccttgggctgcctttcctgcagtatctggagtccatctttcaccatcttctcctgagattgtactggaccgtgaccactcttcttccattggctgcctctcttctgatgccattatttcatcaccagagaatacacatgcagcaaatagcattgtgagtcaaactattccaaaagcacagattcagcaatcaacacacactcatctggatatctcactttttccattgggtttaactgatgaaaaaagtaatggaacaattgcccttgtggatgattctgaggatcctggagccaatgtatctaacatacagcttcagcaaaaaatttcaagtctggagattaaactcaaagtatctgaagaagaaaaacagagaattaaacaggatgtggaatcattgatggaaaagcataatgtcttagaaaaaggctttctaaaagaaaaagagcaagaggccatttcttttcaagatagatacaaagaacttcaggaaaaacataaacaagaattggaagacatgaggaaagctggtcacgaagccctcagcattattgtggatgaatataaggcactactgcagtcttcagttaagcaacaagtagaagctattgaaaaacagtacatttctgcaattgagaaacaggcacacaagtgtgaggagttgctaaatgctcagcatcagaggctccttgaaatgctagatacagagaaggaactgttaaaagaaaaaataaaggaagctttgattcagcaatctcaagaacagaaggaaatattggaaaagtgtttggaggaagaaaggcaaagaaataaagaggcattagtatccgctgcaaagcttgaaaaagaagcagtgaaggatgcagttttaaaagtcgtagaagaagaaagaaaaaatttagaaaaagcgcatgctgaagaaagggaattatggaagacagaacatgcaaaagatcaagaaaaagtatctcaggaaattcaaaaagctatacaagaacaaagaaaaataagtcaggaaactgttaaggcagcaataatagaagagcagaaacgaagtgaaaaggctgtggaagaggcagtgaaaagaacaagagatgaattgatagagtatataaaagaacagaaaaggctcgatcaagtcatccgccaaagaagcctgtccagtttggaactgttcctctcctgtgcacagaaacagttaagtgctttaatagctacggaaccagttgacattgaataaaaagaacatgacaaacccacactggcattggataaatcatattacaccttcaaaatacacactctgaattataaagatgtgtttgttttctttccaaatcatgtagaattgatttccagttcaaggataaaccaaaacaatatttagaactatcaagtgatctaatttattttcttttggtttcttctttacatttactgttattttattattattagtagtagcagcaacagagtatgatatgacccaaaagccattgtaaagtgccacattaccaaaattaattaagtaaactttatagcctgtgggagtctattatatattattttgcaaaagtagtaaatatattattgtttcatgatgactcttgatgagatgctagaatgtaaccatacatttatcttattttgaggatagaaatagcatggatttcaacatcacttatttatctgtataattggaaataaaacaccgatatgatagagaatcattccggcattacctaacctcttctgcagttggatctatgtattttcattggtctactgaaaacaaacaatacaattaaaagcactaaagattattatattaattcaactttgatctgatatatcacttaaactaaaggggtgtgtgtggtgtatgcttgtttcctatttctgctctttaaagatactttgaatcaataaaaccattagtctacaaatcaaattgtgaacttaatctctagaaagagaatataactcagccatttataggaatttaggttcaagtacaggatatatgaaatcttttcccagtatttcagaatgtacttaattcacaggcaggatgcttcaatgcaaaatcatgaatatttttaattcaaaactaaaatgtcattaatatgtatgtatgcaaatgttttatcttattttctgaaatgcatctactttcatgggctttgtacgtttctgagatttctcagtgtaataaaaagagctcccaaacttatttgg

SEQ ID NO: 1111 - protein, 439 aa, Homo sapiens
MDDDDFGGFEAAETFDGGSGETQTTSPAIPWAAFPAVSGVHLSPSSPEIVLDRDHSSSIGCLSSDAIISSPENTHAANSIVSQTIPKAQIQQSTHTHLDISLFPLGLTDEKSNGTIALVDDSEDPGANVSNIQLQQKISSLEIKLKVSEEEKQRIKQDVESLMEKHNVLEKGFLKEKEQEAISFQDRYKELQEKHKQELEDMRKAGHEALSIIVDEYKALLQSSVKQQVEAIEKQYISAIEKQAHKCEELLNAQHQRLLEMLDTEKELLKEKIKEALIQQSQEQKEIKCLEEERQRNKEALVSAAKLEKEAVKDAVLKVVEEERKNLEKAHAEERELWKTEHAKDQEKVSQEIQKAIQEQRKISQETVKAAIIEEQKRSEKAVEEAVKRTRDELIEYIKEQKRLDQVIRQRSLSSLELFLSCAQKQLSALIATEPVDIE

SEQ ID NO: 1112 - DNA, 2684 bp, Homo sapiens
cgggggcagaggtgttcgaagccgggtggtgcgtgggctaccccaacctgtgtggctgggccgcggtctcccctcaagggcctggggccgtgcctcgggtgtacgcgtaggggtctgtgtgctgggggtggctcaccgggcagcgtgggtgagcggcgcagcggcggcagcggagagcgagagaggggagcaggcttctaaccctcctttatgtgactcagagaaaggagacctcattccaagttccaggattaattctggtgccacttgaagaatggatgatgatgattttggtggttttgaggctgcggagacttttgatggtggaagtggtgaaacccaaacaacatctcctgctattccttgggctgcctttcctgcagggaaacatgcaattttcattgtgagctgccttccagagtttatggtagaacttcactgacgttgctgatgccaatgtggaataaagtatctggagtccatctttcaccatcttctcctgagattgtactggaccgtgaccactcttcttccattggctgcctctcttctgatgccattatttcatcaccagagaatacacatgcagcaaatagcattgtgagtcaaactattccaaaagcacagattcagcaatcaacacacactcatctggatatctcactttttccattgggtttaactgatgaaaaaagtaatggaacaattgcccttgtggatgattctgaggatcctggagccaatgtatctaacatacagcttcagcaaaaaatttcaagtctggagattaaactcaaagtatctgaagaagaaaaacagagaattaaacaggatgtggaatcattgatggaaaagcataatgtcttagaaaaaggctttctaaaagaaaaagagcaagaggccatttcttttcaagatagatacaaagaacttcaggaaaaacataaacaagaattggaagacatgaggaaagctggtcacgaagccctcagcattattgtggatgaatataaggcactactgcagtcttcagttaagcaacaagtagaagctattgaaaaacagtacatttctgcaattgagaaacaggcacacaagtgtgaggagttgctaaatgctcagcatcagaggctccttgaaatgctagatacagagaaggaactgttaaaagaaaaaataaaggaagctttgattcagcaatctcaagaacagaaggaaatattggaaaagtgtttggaggaagaaaggcaaagaaataaagaggcattagtatccgctgcaaagcttgaaaaagaagcagtgaaggatgcagttttaaaagtcgtagaagaagaaagaaaaaatttagaaaaagcgcatgctgaagaaagggaattatggaagacagaacatgcaaaagatcaagaaaaagtatctcaggaaattcaaaaagctatacaagaacaaagaaaaataagtcaggaaactgttaaggcagcaataatagaagagcagaaacgaagtgaaaaggctgtggaagaggcagtgaaaagaacaagagatgaattgatagagtatataaaagaacagaaaaggctcgatcaagtcatccgccaaagaagcctgtccagtttggaactgttcctctcctgtgcacagaaacagttaagtgctttaatagctacggaaccagttgacattgaataaaaagaacatgacaaacccacactggcattggataaatcatattacaccttcaaaatacacactctgaattataaagatgtgtttgttttctttccaaatcatgtagaattgatttccagttcaaggataaaccaaaacaatatttagaactatcaagtgatctaatttattttcttttggtttcttctttacatttactgttattttattattattagtagtagcagcaacagagtatgatatgacccaaaagccattgtaaagtgccacattaccaaaattaattaagtaaactttatagcctgtgggagtctattatatattattttgcaaaagtagtaaatatattattgtttcatgatgactcttgatgagatgctagaatgtaaccatacatttatcttattttgaggatagaaatagcatggatttcaacatcacttatttatctgtataattggaaataaaacaccgatatgatagagaatcattccggcattacctaacctcttctgcagttggatctatgtattttcattggtctactgaaaacaaacaatacaattaaaagcactaaagattattatattaattcaactttgatctgatatatcacttaaactaaaggggtgtgtgtggtgtatgcttgtttcctatttctgctctttaaagatactttgaatcaataaaaccattagtctacaaatcaaattgtgaacttaatctctagaaagagaatataactcagccatttataggaatttaggttcaagtacaggatatatgaaatcttttcccagtatttcagaatgtacttaattcacaggcaggatgcttcaatgcaaaatcatgaatatttttaattcaaaactaaaatgtcattaatatgtatgtatgcaaatgttttatcttattttctgaaatgcatctactttcatgggctttgtacgtttctgagatttctcagtgtaataaaaagagctcccaaacttatttgg

SEQ ID NO: 1113 - protein, 409 aa, Homo sapiens
MPMWNKVSGVHLSPSSPEIVLDRDHSSSIGCLSSDAIISSPENTHAANSIVSQTIPKAQIQQSTHTHLDISLFPLGLTDEKSNGTIALVDDSEDPGANVSNIQLQQKISSLEIKLKVSEEEKQRIKQDVESLMEKHNVLEKGFLKEKEQEAISFQDRYKELQEKHKQELEDMRKAGHEALSIIVDEYKALLQSSVKQQVEAIEKQYISAIEKQAHKCEELLNAQHQRLLEMLDTEKELLKEKIKEALIQQSQEQKEIKCLEEERQRNKEALVSAAKLEKEAVKDAVLKVVEEERKNLEKAHAEERELWKTEHAKDQEKVSQEIQKAIQEQRKISQETVKAAIIEEQKRSEKAVEEAVKRTRDELIEYIKEQKRLDQVIRQRSLSSLELFLSCAQKQLSALIATEPVDIE

SEQ ID NO: 1114 - DNA, 2680 bp, Homo sapiens
cgggggcagaggtgttcgaagccgggtggtgcgtgggctaccccaacctgtgtggctgggccgcggtctcccctcaagggcctggggccgtgcctcgggtgtacgcgtaggggtctgtgtgctgggggtggctcaccgggcagcgtgggtgagcggcgcagcggcggcagcggagagcgagagaggggagcaggcttctaaccctcctttatgtgactcagagaaaggagacctcattccaagttccaggattaattctggtgctatacgtggatgacctgcttagttttaatttttggagaaatacattttataaaacattttcatcagattgctaaaattgtgccacttgaagaatggatgatgatgattttggtggttttgaggctgcggagacttttgatggtggaagtggtgaaacccaaacaacatctcctgctattccttgggctgcctttcctgcagtatctggagtccatctttcaccatcttctcctgagattgtactggaccgtgaccactcttcttccattggctgcctctcttctgatgccattatttcatcaccagagaatacacatgcagcaaatagcattgtgagtcaaactattccaaaagcacagattcagcaatcaacacacactcatctggatatctcactttttccattgggtttaactgatgaaaaaagtaatggaacaattgcccttgtggatgattctgaggatcctggagccaatgtatctaacatacagcttcagcaaaaaatttcaagtctggagattaaactcaaagtatctgaagaagaaaaacagagaattaaacaggatgtggaatcattgatggaaaagcataatgtcttagaaaaaggctttctaaaagaaaaagagcaagaggccatttcttttcaagatagatacaaagaacttcaggaaaaacataaacaagaattggaagacatgaggaaagctggtcacgaagccctcagcattattgtggatgaatataaggcactactgcagtcttcagttaagcaacaagtagaagctattgaaaaacagtacatttctgcaattgagaaacaggcacacaagtgtgaggagttgctaaatgctcagcatcagaggctccttgaaatgctagatacagagaaggaactgttaaaagaaaaaataaaggaagctttgattcagcaatctcaagaacagaaggaaatattggaaaagtgtttggaggaagaaaggcaaagaaataaagaggcattagtatccgctgcaaagcttgaaaaagaagcagtgaaggatgcagttttaaaagtcgtagaagaagaaagaaaaaatttagaaaaagcgcatgctgaagaaagggaattatggaagacagaacatgcaaaagatcaagaaaaagtatctcaggaaattcaaaaagctatacaagaacaaagaaaaataagtcaggaaactgttaaggcagcaataatagaagagcagaaacgaagtgaaaaggctgtggaagaggcagtgaaaagaacaagagatgaattgatagagtatataaaagaacagaaaaggctcgatcaagtcatccgccaaagaagcctgtccagtttggaactgttcctctcctgtgcacagaaacagttaagtgctttaatagctacggaaccagttgacattgaataaaaagaacatgacaaacccacactggcattggataaatcatattacaccttcaaaatacacactctgaattataaagatgtgtttgttttctttccaaatcatgtagaattgatttccagttcaaggataaaccaaaacaatatttagaactatcaagtgatctaatttattttcttttggtttcttctttacatttactgttattttattattattagtagtagcagcaacagagtatgatatgacccaaaagccattgtaaagtgccacattaccaaaattaattaagtaaactttatagcctgtgggagtctattatatattattttgcaaaagtagtaaatatattattgtttcatgatgactcttgatgagatgctagaatgtaaccatacatttatcttattttgaggatagaaatagcatggatttcaacatcacttatttatctgtataattggaaataaaacaccgatatgatagagaatcattccggcattacctaacctcttctgcagttggatctatgtattttcattggtctactgaaaacaaacaatacaattaaaagcactaaagattattatattaattcaactttgatctgatatatcacttaaactaaaggggtgtgtgtggtgtatgcttgtttcctatttctgctctttaaagatactttgaatcaataaaaccattagtctacaaatcaaattgtgaacttaatctctagaaagagaatataactcagccatttataggaatttaggttcaagtacaggatatatgaaatcttttcccagtatttcagaatgtacttaattcacaggcaggatgcttcaatgcaaaatcatgaatatttttaattcaaaactaaaatgtcattaatatgtatgtatgcaaatgttttatcttattttctgaaatgcatctactttcatgggctttgtacgtttctgagatttctcagtgtaataaaaagagctcccaaacttatttgg

SEQ ID NO: 1115 - protein, 439 aa, Homo sapiens; identical to SEQ ID NO: 1111

SEQ ID NO: 1116 - DNA, 1853 bp, Homo sapiens
gatgtggaatcattgatggaaaagcataatgtcttagaaaaaggctttctaaaagaaaaagagcaagaggccatttcttttcaagatagatacaaagaacttcaggaaaaacataaacaagaattggaagacatgaggaaagctggtcacgaagccctcagcattattgtggatgaatataaggcactactgcagtcttcagttaagcaacaagtagaagctattgaaaaacagtacatttctgcaattgagaaacaggcacacaagtgtgaggagttgctaaatgctcagcatcagaggctccttgaaatgctagatacagagaaggaactgttaaaagaaaaaataaaggaagctttgattcagcaatctcaagaacagaaggaaatattggaaaagtgtttggaggaagaaaggcaaagaaataaagaggcattagtatccgctgcaaagcttgaaaaagaagcagtgaaggatgcagttttaaaagtcgtagaagaagaaagaaaaaatttagaaaaagcgcatgctgaagaaagggaattatggaagacagaacatgcaaaagatcaagaaaaagtatctcaggaaattcaaaaagctatacaagaacaaagaaaaataagtcaggaaactgttaaggcagcaataatagaagagcagaaacgaagtgaaaaggctgtggaagaggcagtgaaaagaacaagagatgaattgatagagtatataaaagaacagaaaaggctcgatcaagtcatccgccaaagaagcctgtccagtttggaactgttcctctcctgtgcacagaaacagttaagtgctttaatagctacggaaccagttgacattgaataaaaagaacatgacaaacccacactggcattggataaatcatattacaccttcaaaatacacactctgaattataaagatgtgtttgttttctttccaaatcatgtagaattgatttccagttcaaggataaaccaaaacaatatttagaactatcaagtgatctaatttattttcttttggtttcttctttacatttactgttattttattattattagtagtagcagcaacagagtatgatatgacccaaaagccattgtaaagtgccacattaccaaaattaattaagtaaactttatagcctgtgggagtctattatatattattttgcaaaagtagtaaatatattattgtttcatgatgactcttgatgagatgctagaatgtaaccatacatttatcttattttgaggatagaaatagcatggatttcaacatcacttatttatctgtataattggaaataaaacaccgatatgatagagaatcattccggcattacctaacctcttctgcagttggatctatgtattttcattggtctactgaaaacaaacaatacaattaaaagcactaaagattattatattaattcaactttgatctgatatatcacttaaactaaaggggtgtgtgtggtgtatgcttgtttcctatttctgctctttaaagatactttgaatcaataaaaccattagtctacaaatcaaattgtgaacttaatctctagaaagagaatataactcagccatttataggaatttaggttcaagtacaggatatatgaaatcttttcccagtatttcagaatgtacttaattcacaggcaggatgcttcaatgcaaaatcatgaatatttttaattcaaaactaaaatgtcattaatatgtatgtatgcaaatgttttatcttattttctgaaatgcatctactttcatgggctttgtacgtttctgagatttctcagtgtaataaaaagagctcccaaacttatttgg

SEQ ID NO: 1117 - protein, 277 aa, Homo sapiens
MEKHNVLEKGFLKEKEQEAISFQDRYKELQEKHKQELEDMRKAGHEALSIIVDEYKALLQSSVKQQVEAIEKQYISAIEKQAHKCEELLNAQHQRLLEMLDTEKELLKEKIKEALIQQSQEQKEIKCLEEERQRNKEALVSAAKLEKEAVKDAVLKVVEEERKNLEKAHAEERELWKTEHAKDQEKVSQEIQKAIQEQRKISQETVKAAIIEEQKRSEKAVEEAVKRTRDELIEYIKEQKRLDQVIRQRSLSSLELFLSCAQKQLSALIATEPVDIE

SEQ ID NO: 1118 - DNA, 20532 bp, Mus musculus
  misc_feature (1)...(20532): n = A, C, G or T/U
caggctgcattttaccccacagcaccaccaccatcgggttctgggcttgcgggaagctgatgcatcgctctgtggtgggagaatgtagcctaggcctcagcctgcgtgagaaatgacacaggctgaggctgaagctgggattccctgacttccggacatcctgaagctggaaatggagtgaggaagaagagaagtcggagaaggagaaggaggagtcgggaaggagagggcccaaggatctgtgagaatgacctggctgggggaggggcgactccggcttagctcagggagcctctgtagaagaaggcttcctccatgttccagggcagtggttcttgatgagagagacagtcctggcttatccatactgttactcactgttcattgtggacgaagggtgtatacaacttcttcagggtggaccagagattgaataccttctgaaggaaggaaatgtctgggaagggaagccgtttggctaaaccctcaggaccaatctagatacctcattagtatggaggactctgattctgtgctaccagaccactggtcacattctttatgtggggagctgtggtcatgttctttcgggccaggaatctggccaggagtagggacactcctaccatcctcaggagtgtgctgggatttctgaactactcagccttatcaagtttcctggcatggtccactgccccacatatgtgcatatgttgtgtgtgttgcatgtctgtctatttgtgttgtgtatgttttgtgggtgtgtgttgtgtgtcttgaggaagactttgagctcctgattcatctgcccccgcctctcggatcctgggtgacaagcgtgtgccaccatacctgacctgacgcacaggtggcactttatctcttctgcccatcctatcaacactattcaatccctgataatctctcccagctgctccaatacgcttctaacttatctcctggcttttagctatgtacttaattaagaaagtcaccctccacacagctgacagagatggcaaagccaattcaaggccaaagttgactcacctttaatggctcttaaccccacaaggcacttgtcagtcatcacagcttgatagagaccatcagtctctttccatttacactcctaggtctccctctgtgctcagcaggatttaactgcctggagcatcctggactctcccctgtgcctctgtttttatcctgcagcagctggctggctctcctctgcccgactactttttgtttagatttatctctgtaccagagcttctagaccgtctttccagcgtgtcctaggtgcgtacactctccatttttctttggctcctgcacacatctctggaacgatccatgccaaattggaacgatctgctctgtgtctttctctttcaacagattactatctgctgagggcaggggtcatatctcacatcatttcaaacctggaacctagaatgatgtctggcctacagaaggtgttctatacacggtagtggagctgaaataaaccgaatcaaacatccacaaaagaaaactcctgagctgtgtcaaagcctctggctgttagtcttacagggcagatcacacagtgatcggctcttttgaacagaaagagagtaacgtgacaggcacccattctccctcacttaccgctttcctgtgcgtgaatactcccccagaggggtgagatccaaacaggaaaatgtaacagaggtcctggcaactgtcattataacagtgaaaagctggaagcagtccaagtgtctaacggggaagtgactgagcaaacactgggattattatatagctattaaaaatgacagaggtgagaactgtcaacacggagagctatgtactggcaggaatgctaagtggaaaaaagaacacagattggcgtttaaggatgtgtgtgcacagtaataaagatcataagccaatctggaaaaaaaaaaaatggaaacgactgcatctcagagttctctgtgtgttttggaacctgtaggattccattcgtttatgacaataatagctgagatctcatctcccagctgccttattccactgcagttgatgtggtggcacacacgtgtaatccaatcacttaagaggcagaggcaggagcatcaggacttcaaggttatcctctgctgcacaatgaatttgaagctggcccgagttgcttaagacctggtctcagaaaaacaacaaaggttgaccacggtggctcacatctttagtcccagtggaggcagaggtaagcagatctctgaggtcagacagagatacacagtgagtcctcatgtcagaaaacaacaaaacaaaaatatcacagttttcagagtctgggcagggacggctcagtggttgagagcatgtaccactcttgcaggagacctggatgaggtctgcagcatccacctagacagctcacaacagcctctatgttcagttccagaggaatctgacaccctcttctggattctaaggataaggtactcacacgcacccccccccaccacacacatacacacacaagctcacgtgtgcgagcatgcacacacaaacatttttaagtcttcagattaagtactctatgttaccaccaaacagaatattccaaagagatacttagtatcaacgtctctgtaacattgttaagaatataggacatctctcctcttttctcctcctcccaccccagcgcattttactatgaaaccagaatggtctcaaatttgatattctcctgcctctgcctcctgagttcacagctacagatgtgttccagcactgtattttgtgtgtgcacttgtgtgtatgagtgtcttacttacggtttctattgctgtcatgaagcaccatgaccaaaagcaacttgaggaagaaagagtttatatcatcttgaactctgctatccagagatgtcagggtaggaactgatgtagtggccacagaggaccaaggattacctgtctggctttccctacttgccagttctctttcttacacactccaggcccagggacctgcacaggaatggcacctactaacagtctgctgggcctgtctacactaatcactaaacgataaaatgtcgccacagattagcctatgggctgatctaatggaggcattttcccagttgaaggtccctcttctcagatgaacctgtattgtgtcaagttgacagaaaactaagcagcaggatgaatttatgtgtatgggcaaaatgtgtgtgtgtgtgtgtgtgtgtgtgtgtgtgtgtgtgtgtgagagagagagagagagagagagagagagagagagagagaggtggtggtggtagtgtctctttgtgtagtcctggctggcctggaacttggtatatggcacaggctggcctcaaactcacagacatccacttgcttctgcctcctgagtgctaggattgcagatgtgcctaatgattttaggatctcttagtcttcctctcctccctacccctcttcttgattctttgaggtagggtctcacactgtagcctaaggctggcctgcaactctgtgtagcccagcctggcttgggtctcactgtatagctcatactgaccttctgctgtttggatgtggcccccaaaagcccatgaattaagagcttaatccccatccagcaggacaccgccgcaaagggtggaagtgttaggggttggccatagtgagggctatgctttgtcttatgtgtttactggcatgcccttgaaggtgattgttgggccccattttggccctggtttggaccttgaagacaaacctgagcctggctccagttttgagaccggtctcagtcacttccatatcggggtaactcagcaagacctgcttggccctggccctgctgttgctgaggtagagctttgccactggccctgtcagtcactccataccctccgtcacccttccctgcctcctatgtcatcttacctgtcttagtcagggtttttattcctgcacaaacatcatgaccaagacgcaagttgggaaggaaatggtttattcagcttactcttccatcatcaaggaagtcaggactagaactcaagcaggtcaggaagcaggagctgatgcagaggccatggagggatgttctttactggcttgcttccactggcttgctcagtcccacacggcaagcaggtgaaggggagaaagcgagactcccttcttccaatgtccttgtatggtctccagcagaaggtgtaacccagattgaaggtgtgttccagatgaccttgaactcagagatgtccctgtcttaaccttctggaatccatagccactatgcctcaagatctccataccaagatccagatcagaatcttctatctcccagcctccagattagggtcactggtgagccttccaattctggattgtagttcatttcaaatatagtcaagttgacaaccaggaatagccactacattaccccaccaaaaatccccctccctatgttcccaacttatataaggaagacactgatgccataaagttggttcctgctttgataaggctcctggctcggtgtgtttcttttggaccgtggggcactcgccatccagctcagacccggagagagaccccggaaggagtgagacccctctcctctcacctggacctgctggcaaggagccggcatgtgcttatcatagaaaacccagtccctcttcttcctctgtgttttgttctgttttcctaaggtaggaacagtttgccacacacctctggactgatgtgcccaaagtaatggggctagcaacaggtcatgagccagaacctcaatgctatgaggaaaataaacccttttcttcacccccgaacctctttacacacacacacacacacacacacacacacacacacacggaccagggaccagggaccagggacctgcacaggaatggcacctaccaacagtgtgctgggcctgtctatatatgtgcgtgtgtgtgtgtgtgtgtgtgtgtgtacatgcacgtgggagtaagagaatggctttgagtgttgttcctcatgtgctggctgcccttttgtggttggagtagatagagcttgtgatgtaagctaggctgcccgaccagcaacaccacacttggcagttttaaatgtaggtcctgaggattagactcaggcccctgtgcttccaggttttgctctccagttcgggctgaccttgaactttgagcaaactatgatgcttccttccaggtgctgggatgacaggcctgtgccaccatgcccagccgttctgcctcttatctcaagagtacaagtagacgctggggccattctgctcggttatgtctattctgtaggagctataaccagaacacttggacgtggactaaattctgactgatcaaggtcaagagcagcagggtgtgctgcaggtggcactgctctggtaaagacaggttatccatacgaaagtgaggggcttaattgtgttctacaatgatagagctgttgaaactttccaaatggggcagagcaagaggcaagttcaatgccagtctgatctacttaatgagttctaggctagccagaactccatagtgagaccgcactgaacagatgcaagagactccaaatgaataagggggacttttgtttcgttttgggaacagggtctcacgtagcccaggctggattccaactagctatgaatccgaagctgaccttgaatgtctaaccctcaagcttttacttcctggtgctggaattacaggggtgggccacagtgatgggtttctgggtgccagtgttagaatccagggcctccgcatgctagtctactgcacctccagctggagacatgaatcatttaggtgaaaaccagtttggcctttgacgatggtgtcaggggtcctttggtgagactgggtttcccaactaagcttcagcttctcccctccccccacccccaccctgactgcttcagggatagctatggggtgcatcgccatctggtctgggtaaaggcacagaaagaagctacattcatttccccgcctgcacgctctgtaatagataactgctcttcagaccctgctggggaacctgtagctagaatccactcatttaaccatgatgtccacgcttcatatgaaaaccccggaagccatcatctccccgctgccatggaaagtgtataattagctcggtgtgcagcttgaccccagtgatttttctgacgcacttggccccgcagtgtgccctttctgagacctcctgtgtcttctccacagctggagatgccctaaactgcacgcagcacttcctgtgggcgtggtcttgcattttaggcgctccttggtgctggctgccctcccttaatgggtcacatgcttcagctacttacatccccacaaagctctttgaaaaggaccatgagtggctgtattgatcataattaagttttccggtccctcctatttctttttaaaaatgattttctgatggagtcctctcaaagaaacactataattgggcagcctggggcatgtgggaaagcctcccccgatggcgtcagtagctattctcaggagaggaaaggcagggtatccccactgggagatgacagcacttgtttcaagttggggaagagcctgtggttctcttcctgcgtttggaggggaaagcgaacacacaatattcatttcctaaatacgggacgtgctttgccagcgtctctttttccaacatgtcatatcctggccgaaggcagcaggggtcagggcaggaaacagcagcttctcagaatgagacaaggctttcccagagccgtcattggctcctgggagctataaagtatgctcgtccagaaacggtctcccacttttcttcctggaggccagagtgaagggtaagtggggagtccgagggatgtgtctgcaatgggattggtgatatcggggtcaactctcgaggcgtcatgtatttggagtgactttttcccaacggttcttgttacctgaaaacttcttactggtcagctagatcatggaggtcaaccaggagctgtaggacctatgagtcaggagaccagtgttcttctgggggcactgagaaacatcagctgttggtagccggtctctaaaggccttcattttaaccgaggacaatgagttctggctgtgcatgccgatgcaagcctggaattctagaactcaggaggtggaggccggagaatcgggggtttgaggtcaacttggactatgaaacagcctgtctttaaaaacaacaaaaacaaatggagaaagataaaaaattaaataacttctgccctgctcgttcaggtccgacatgctctttcagtgacttatttggtgcctttaagaagttctgactggtggagagtacagtgtgtatgaaatggggctccctaattaccaggacagatggccttttacagatgaacctggtacattagctttctcccttagtcaccttttattggcttcagtacatctgggcccaaggaagcctccagtgagctgctagcaggcaccttttcttttttaccttgagacaagttcttgttatgtagccttgaatggcctagaactcagtatttagaccaggttggccttgaactctcaatgatcctgcctctgcctcccaagtgctaggattagagagagggacagggacattgagagagggagagacagagggagatggagggaggtagagagaggaagaggggtgagaaagaatgagagagggagagagagagagagagagagagagagaatataatgagaagggggggggggcaagtaccttgagtccctaggacacaagtctccacataatgaaaagtttttgttacattacatgcacggtttgctacttttaaggtgttctcttctttttattggtccttgtttgtcaggggttggggaatagaatagggtgtcacaccagacaatggctctacccctgagctgcatcctcagcccaagtgtcattttgaaaacagagcaaagtctctgttttcagagcattaacctggagcagctttctaatagtctccaccttcccgtttaaacctttatttaaatctgtggatggtgtccatagattctgttccctggaaggaaagcagaagacagcataatctctgttggaacgcacaagttaacgggttctgggaacttgtgtgacctgtcccaggctccagagcctttggaaacttgacccataacccagtagtaacctacctccctgttcccagtcctgagtggtttattttttcgtgtattcatttcggcagccttgtggattgagtctgggggttgaacgctaggtaagtgatctaccattaaggcaacacgcccagcataaagtctattaattatttgaggactctctagagagtgcacgaggcagctctagcctagggcagcaacgggtgcggaaactcgggctaactgtgcgtctatgtccctcacagggcatggagaagcgggcggcctgggagccgcagggcgccgatgcgctgcggcgcttccaaggattgctgctggaccgccgtggccgactgcacagccaagtgctgcgcctgcgcgaagtggcccagaggctagagcggctacgcaggcgctccctggcggccaacgtggcgggcagctctctgagcgccgctggtgccctggcagccatcgtggggttgtcactcagcccggtcaccctgggagcctcgctcgtggcgtcggccgtgggcttaggggtggccaccgccggaggggcagtcaccatcacgtccgacctctctctgatcttctgcaattcccgggaggtgcggagggtgcaggagatcgccgccacctgccaggaccagatgcgcgagcttctgagctgtctggagttcttctgtcagtggcagggacgcggggaccgccagctgctgcagagcgggagggacgcctccatggccctttacaactctgtctacttcatcgtcttcttcggctcacgtggcttcctcatccccagacgtgccgagggggccaccaaagtgagccaggccgtcctgaaggccaagattcagaaactgtctgagagcctggagtcgtgcactggcgccctggatgaacttagtgagcagctggagtcccgggtccagctctgcaccaaggccggccgtggccacaacctcaggatctccgctgatctggacgcagcgttgtttttctaagagcatcctctacctatatggaatgttctagagtcgtagcatccacagggaagtgctacatgggtggagtgcaaaggatgttaggaactcttcttgcagggcttccgtcagtccttagctccttgtgtgtgtgaaggacttttcgcttgtgtaatcccaactgagtatgtgatcctttttgtctttgtagggattgtagacccagcctgggccgcggagctgacttgctctgctcttcccaccccagtttatccactcatagaccaaatctgactattgcatactttcccagcatggcttcaaattcacacctctaggtaccctgagagggaaagccaccggaagagtcactttaatcgcaacatactcacccgccttcacttctgtaaagaagctgggggaggggtgagatgcagtccctgacaattttaaataactgaccacaaagaggagagcaacggcctttgagttaaacagtcttggactgatcacatgctctgtcccccaccgtcgtgtgacttagccaccttctcttgctgagacttggcttgttcagtgacacagatggtggtaagaacacaccctgttgtgaagccctgagataagaaaggaccttcagagtcactctcagaaagtccaggaaagactggcccagcagcccaagaaagactatgctgtgtgcttgtaaagccagttactctgtcccctgtaaactagaagacagagcagcacagaccctttagagggcagtgttgcccattccatgtagagactggtacagaggtaatgtgaagttaccagcaaaaacaaacaaaatcaaaaacaaaaaataaaaacaaaacaaacaaacaaataaacccccaaacctctttatcctctgaaaactccagacaccatatctttatttatttaaaattagttatttaatttctgtgtattatttacatttgattttatttaactatagcatttagaaaataataagaatagtaagggtctgaataggaagggagtctgttaaggctctttccaggaggtcaggtttggatttctagagtctttttccctcagagaggactctctagtgtttggcacgatctctgtaagtaagatgggggagtcctgaggagagagagagagactaaactgatttttaaactggtaaatggagtcttgaattgtggaatatatgaatgattaagcctgtgtgtcctgaaggtactttgccagaaagcacttgacttgaaaaagaaaacctatttaattcaggagtggaggaatagagactcatgaaggaaacatttagaccttggaaacctgatgtcctatgaaattctgtttttataaaattgtgttatggtagagatctgtcacattttgactttggggctgtaagaaacctgctatctatgcttaagaaagtacttctaatttattcaatatcttcctaaattatcctttagaaagagttgcaaagtctttgggaccatacccaggaaaccttggctgtatatttaaattatttaatgctatacatttgcgcagcccctatgattcccagtgatggccacgtgtctgaggaaatgttttgggcatgaggggaaaggggtgctctttctatatttatttttgtttcctataaactgtagttggggtatatcctgatttaatttgacattgatgtggctttttttttttttttgacactgggtnnnnnnnnnnnnnnnnnnnnnnnnnnnnnnnnnnnagactgcctgtgtgggcactggagtatacctcaggctctccttccatcatccggctgaagccattccctgacgccgtcatgcattggtgctttgtctcgggttatactcctccattaccgacctgttccatataacccaaaatgggaatgttttgagtatatagcaaagtactaagcttctgaaggttttatcagtggtctgctgtgtgcgcatctgagagtgtctactttccatccacagatggcagaagggtctagaggttgagttccagggcacccgagctacacaatgagacctcatctcaaaaatacaatgaaacaacaaaaactgaaagcacatttgaataattcgctgtttgtctgtattatgagggattagcttggtcattctctttcttatgtgtaggcatgttgtgaaaattggaggatttgccaggggttagcaaagttcagtacaattgatcctagagacaaattgtttatttctttcatgggacagtggagtgggttttccctttcgaccgtcattctataagcaagcaggtcgaaagggtttgtggcgcaaatgaaaagagagaaataaatgttagggtttggaaaatacatgtttgttctaaatgctggggtgttcttgtgttccttttttggttttacagtcacctggattgttttgtttcacagtaaagggaccacatttggtttgcatcttaaaactctgataaagtttgggggctggagagatggctcagcaatgaagagcatctgttgctctcacagagttctggggttccattcccagcacgcacatgacagctcacaattatctgtgaatccagttccaggggataccctcttctgatctccacggacaccagccatgcactcggtacgaatacatatatgtgggcaaaacattcatatatacaatttaaaaaaaatcataaaaaagaccaaccctcctcaaggaagaaagaagaacccttagtgagcactttgaccctaactccttttgtgtatttgccctagacacaggtcatgtccaatatgatgaatttcaaaggtaaaaaaagtatttgctgggctgggggcaggggagagaggagtgctgcagagaccattctagattaggtcatggtcagtcaactttctgaatcaccccttcagcaacttggtatgaataataaggaaaaatagacaaagaggttgtatgggggctaaagtgatggctcagctgctaagagtctttgctgttctttcggagaagcacagtttggttccaacattgatttcagttggctcacaactgtgtggagttctggcacctcaggggatttaatgcccttgtctggcctctgtgggcacctgcataccctcagacatacagacgtagattaaaactaagttgaagaaaggaggctacatagtggtaagtggagattagcgtagctgaggatgggagcttcctaattcacgcttccattacagtaaatccgtccttcctgttctactagagtaaatggctcaatcctaaaagttttcttcttttcataattactggtcccattttgtctttgaatgcttttaagctgtgtgagtcaattgtttaatcaaatgctatacaggaattcccatgtgatctagaaagcaggctttttagtcatcttacaaatttgaaagtgagttggtcctagtgatcccagaactcgaaaagctgaggcaggaagaattttatgttctacctgagcccaggctacatagtgagaccctacctttgagaagaggaggaggaggaagaggaggaggaagagcagcagcagcaacaatgacgacgagatgacaacaataacaacaacaaaacaataccaactaaaaagaaaccctcaaaacaaaaacaaaaaaccacacccaaccctggttcggtggtgcttgtaaccctagcattcaggagttagaggcaggaagattaggaagtcaaggtcagctttgcctatggaagccagcctgagttataagagactgtctttcaaaatacagaagcattcaaaatgatcagctaatgccaagtttaatctctattcctgttattccagccctagctctagataggaggatgaagaattcaaggcaagcctggtcttcagagacctatctggaaaacaaaacaaagcaaaagcttatgtggtggctgccgtaagcagttgggaacttacattctggagtcactctaaccactcgctcgtctgtgcacctgcgccttggaaagcttccagggtctgtgtcagccccagtctgtcacagcggacctgaagctggagtcctatctttgtcaaagcatacagaattcctgtgataacaagcatccttcccgttaatagcaacgggtctcttgttgataggaacttaaaagctgcttttgttcctgacaaaactggaagactgtaagaaggaatataaaccctgctgcacactggagctggatagagggccctaagttccaggaatgttctgttagcaaccagagttgtcagaagggaaactgtgctgatagagtgggtcccatctggggaccaggaatgtacacctgggatcctgagcccctgcctcactggcaatgacaatgggctgtggagagtggtggtgttgtggtcttactgtttaatgaggttttgtacctccgttataaccaaccctccctcaccgtaccacccactcaaagtgttgtactagaaggcctgctgtttgcttgatcccagaagtatagccaggggccactgccagtgtctcctcacccacagtgagacactggttcccatggccaagtgtatgaagagagttgaaaccgagataggctgtttctgaaggtggagctgggaaggagtcatgcctcaaatctttctcgaaggcaaaagctgctcttccaggtcaacaaacaacactgccctcatcttatacgggagattagatggcggctctataggcgaaggccttctctatggctccccatggcggatcccgatgaaaagagagagttcatggttttaaggcattcattgtcatggcgtcaagtggatgagtaaaactgtaccccacttttcaggacggtcctgaggttaaatatcttttgcagggaggagtgtctgggaaggggagtttattggtaagcctccaggcctttaggtacctcattaaaatggagatgtcttgaggctagcagaccacaggtcacgtcctctacatatggaggggcttggagtgttgcacttatgtgactgatggctatggagggctgtagctacatgacaggagctggtgcccaggagtgggcaaaatgccatccatcccttcagggttactggggttcctagcctttgctcaaccaggaaccaggctgcctttcaccgtcctacgagatcagaatctagaaaaattaaagtctttctggcaaataatttaataatcatagctaacaattattaagagctgacaaccactgttctaggtacaatttgattttatttacaataatctttccaagtggacactctagttaccttgctattgtcagatacagtgaggaactagagagggcacataaggagagtgacccaggatttgagttctggagtggtctgattctagagttaatactcttggctattctactagtgaatatatttctgcctggcatggtggcttgtgtgtctaatcctggcattctgaaagccaggtcaggaagattatgagtttatgcccagccttggatacagagtaagacctgctctacaaaaaggaggtggtgggggctgtgtaggggaagaaagaaagtccaaaaccaagaatgaggctcctgtgaagggggtggggggtggggagacctgggatggaaagagcagggtttatgctaattgcggaggaaaggagaccttagtgtgttagaaacaacacagccaagaagaaaggggtaactgggtaattttatgtcaatttgacacaaactagagccattttggaagactctatttctcaactgagaaaatgtacccaccaaaatgacctgtgggtaaaagcatgtggcacattttcttgtttgatggtagatgcgggggtgtccagtccactgtggtggggtcacccctggtgtcctgggtgggataagaaaacagcaggctgagcaagccttgaggaggagcccagcaggtagcatccctccacgcttctgccccaattcttagctcctggttccctcctgagtccctgccctgacttttctggactgtcaagtggaaggcgaagaaacccttctctcctgaagttgcttttggtcacagtgttctatcacatcatcggacactaaaatcctgggccaaccaacctctgaaaatgaaacgcttgaggtcagcccaccaaaactgccagagcctgggtgtcagtctttatgtcttccagccagggtgtgcactcattttcagtccactgtgtgctctctctgctggaagcgtctgagtgagtaagtgggtgtgagaatgagtaaggctccaggttccactaaacaatgccaagtcataatgcgttgtatgggtgatatgttgctgacgttacactctgagatgcaataaagcattatctacggtttacattccatcctcacttccctatagcatttgacatggtgaaccacctgtgctcggccgggtcaccttcacacaaaccagagtcacttgggaagaggaaacctcagttgggggtactgcatccattagattggctcatggcacattttcttgactaatgatgtggtagccagcccactgtaggtggtgccactcacatgctggtggtccaggcaggctgagcacaccatgaaaacacaaggaagtggtactctccaccgtccctgctccagtgcctgcctggagctcctgccttgtcttccctcagttgggatctgtgatctgggagctgtaagataaaataaagtctttcctcccagaggtgcttttggccatggtatttgtactggctagttttgtgtcaacttgacacaacctggagttatcacagagaaaggagcttcaggttaggaaatgcctccatgtaaggccccttgtgggtggtgccatccctaggctggtagtcttgggttctataagaaagcaagctaagcaagtcaggggaggcaagccagtaagtaacatccctccatggcctctgcatgagctcctgcctcctgacctgcttgagttccagtcctgcatctttggcgatcaacagcaatgtggaaagtgtagctgaataaactctttcctccccaacttgcctcttggtcacagtgtttgtgcaggaatagaaaccctgactaagacagtgttttacactacctactttaaattttttaaatttaaaaataaacaaataatttatcatcatgtgtggtgtacatgtgtgcacacttgtgtgtggctatgtgtgcaaaggtcaaaggttggtagcagctgtcttcctcgattgccctcttccttttttttttttttttccgagtcaggttttctctgtatagccctggctgtcctggaactcagtctgtagatcaggcgctggcctcaaactcagaaatcctcctgtctctgcctcccaagtgctgggatcaaaggcatgcaccaccacaacccagctgtcctttacctttgttttgagacaaaactgaccttggagttcaccttttgactagcttgggaactagcccttgagatccactgtcatcacctcgtcagcaatggagtgatagatacatcctaggattctgaagccaggttcccatgctactttgtgtggccagctctttacctgctgagctgtctccctgttccctggcctggcttcccagttcctttttcnnnnnnnnnnnnnnnnnnnnnnnnnnnnnnnnnnnnnnnnnnnnnnnnnnnnnnnnnnnnnnnnnnnnnnnnnnnnnnnnnnnnnnnnnnnnnnnnnnnnnnnnnnnnnnnnnnnnnnnnnnnnnnnnnnnnnnnnnnnnnnnnnnnnnnnnnnnnnnnnnnnnnnnnnnnnnnnnnnnnnnnnnnnnnnnnnnnnnnnnnnnnnnnnnnnnnnnnnnnnnnnnnnnnnnnnnnnnnnnnnnnnnnnnnnnnnnnnnnnnnnnnnnnnnnnnnnnnnnnnnnnnnnnnnnnttccttccttccttccctccctccttccttcttccttccttccttctgtcctgtttctccctcacttctcatccctccttccctctttcccttcctttctgttttctgtgctggtgaccagacagagtcctgcacatgtcgattttaaaaacattttttcctctcttgaattcctcagcttctataaatgtttctggtccttaacttccttggtagctcttctctatcctccattcttgatcttcaagtatcccctaattttacactcttaagctctaccctcttaccttcaccgcctccacacaatgccttcccatgcgtgtccactctccgtgttccactacccactcctgaactgtgtgggacttagctgtaaaacatctttctcttgggccaacttgaatttgatgggcataaagtgagatgaagaactatgcaaactgactcagaaggttgctagtggaactaacagaggagaaaaaggggtctgactgtgtccctgggacctacctgtccctgtccctgcagagccacactgtgactccagcctgatgtggtctcactctgacccatatgtgccttgtgtctgtggtttttctgatgatcactcggggcagaaacccaatcacagatatcgttaagtctctatggtggagcctccggctcctgccacatctgttaaatgaacataggaacagcaccaaacatcttcatagaaggtctgacatcgcttcccaccatgtacagtgcccctccaccttcttctctgtaaaatgggcccaatttttactactcttgtgcttcttctattaaaggtagcatatgctgtacccctataatcctagctcttgggaggtaggtataggatgactaagggttcagagttgttctctacacagtgactatgaggccaagctgaactattcgaggggaatggaaaagacaactggggtatcccagttgcctagcttgtaacttcactgtctgcatagctcccaaaggcttagttttcagttatacttttccaaagcatgcatatcttcctaacttaacttgacccattctcttctttcttccctttttaaattctctgttctttaagaaaagaaaatatttatttttatttaatatgtgttttgcctgaatgtatgcatgttgagacaggagacttgtgaattccagaccagcctgggaaacttagtaagagtctgtcaaggggggaaaaaaaactctctaaataaataaacaaataaaacttggttctgggtttgaatgcagattaagaagcacacccagtttctatggggttcgttccacttcctctagtgcacgggggtggggggggggggggctttgaaggaagagctaaggtaacttcaaataatggtgtgatgtaggactgttaaagggctgagtcagaaggaacaggcgcagggtggaggtgcgagttaataggtgattaggagggggagagatgcaggaagcaaagccaaggaaaaatagctaggtgatatccacccttagtggtggatactcgccgaattgaatcggaattaaagccagggcctcatgcagagttagctctctcctacgctgtgggcctcagggattgaactcaggtcttcaggctccgtggtgagtgcctttacccactgagctatctcatgggtccagcccagagattttgaatgagccatagaaaagaatcagggaccatcatacactactggagaacgtcaagcagcatcttcaagggagggtgggggattagctgacttttccttccaggctgtggcgtcataatgggggtgcattagcccctcacttgaaaacagttctagagatgctaaattatcaccgcgtgtgaagactgcacacagcagctccagctcatgttggcctttctgttcattcgttgcagtcatcttgatgtcagctcgtcatcccgggaaggctcctgctttaaacctggcaacactgctgtgactgtcatcgtgacaacatgtatgcgtatgtcactcgtcagcatagcaacagtgtcgggttgccaaggggttttcataaacctctccatctttagtaacctgtgtttttaactgtgcgtgcctttaaaaagaaaacgcttgtgtggtatataaggagtctgacagaaccaggaagtgagtcagagctgcttttcctttttattgcccagctcacagtgggaacttgaccttgaaaccctggcttctgtagattttgacgtaaggattataacgtccacatttcttgattggtgttgactaggttagacccatcccttccccatgtttagttactacagtatgtagtctgggacctcagatactttgggatcttagagacaaacatctttcattctactgacctgaagatggagcggagggaatctggtgaccaagtagcaggcttgataggcaagttggctttgctgtcacgccccgacctgtgtagtggacaggcttcctttagtcctacctgtgggacactgcaaacaggtttcttgcaacataattagcatgagaacacaagtcactacacccctgctatgcccagtatctctgagccacattgtaagatggttctacaggactggctgttccatcagcgctcaccaggactgatccctccaggttcagaaattcctgtgatccatacacttacgaaataaaaaagctctgggtacttagcactaagcactcacacaggacactcccctcccactgttctcaagtaccacccaatgagcatttgggtctagggtctgttcctgtagtgctggcaggacatcaaatggtaccaaggtccaggactagtagtgaccgggatggaggagaagcggaggtcttagctgcagagtctaaaagacctgcggatgtggaacctgcaggaaaggcgagaacaggcctgagaagcaagcgtgggtggctgcagttttaatgagtgttagaggataagttcttgcctcggctcaaaattaactgtttgctgaagggatccctttacagtgtgtggactatgcaagtaacaaaataaattcatttaagctcattaaaaagaaattaaggcggaggcggaggggggggtgctggagagatggttcagtggtcaagagcactgactactcttccaaggatcctgagttcaaatcccagcaaccacatggtggctcacaacccctgtaataagatctgaccctcttctgaagtcagctacagtgtacttatgaataataataaataaatctttgggctggagctagcagggacagagcgagcagaggtcctaaaattcaatattcccaacaaccacatgaaggctcacaaccatctgtac

SEQ ID NO: 1119 - DNA, 2030 bp, Mus musculus
ggcatggagaagcgggcggcctgggagccgcagggcgccgatgcgctgcggcgcttccaaggattgctgctggaccgccgtggccgactgcacagccaagtgctgcgcctgcgcgaagtggcccagaggctagagcggctacgcaggcgctccctggcggccaacgtggcgggcagctctctgagcgccgctggtgccctggcagccatcgtggggttgtcactcagcccggtcaccctgggagcctcgctcgtggcgtcggccgtgggcttaggggtggccaccgccggaggggcagtcaccatcacgtccgacctctctctgatcttctgcaattcccgggaggtgcggagggtgcaggagatcgccgccacctgccaggaccagatgcgcgagcttctgagctgtctggagttcttctgtcagtggcagggacgcggggaccgccagctgctgcagagcgggagggacgcctccatggccctttacaactctgtctacttcatcgtcttcttcggctcacgtggcttcctcatccccagacgtgccgagggggccaccaaagtgagccaggccgtcctgaaggccaagattcagaaactgtctgagagcctggagtcgtgcactggcgccctggatgaacttagtgagcagctggagtcccgggtccagctctgcaccaaggccggccgtggccacaacctcaggatctccgctgatctggacgcagcgttgtttttctaagagcatcctctacctatatggaatgttctagagtcgtagcatccacagggaagtgctacatgggtggagtgcaaaggatgttaggaactcttcttgcagggcttccgtcagtccttagctccttgtgtgtgtgaaggacttttcgcttgtgtaatcccaactgagtatgtgatcctttttgtctttgtagggattgtagacccagcctgggccgcggagctgacttgctctgctcttcccaccccagtttatccactcatagaccaaatctgactattgcatactttcccagcatggcttcaaattcacacctctaggtaccctgagagggaaagccaccggaagagtcactttaatcgcaacatactcacccgccttcacttctgtaaagaagctgggggaggggtgagatgcagtccctgacaattttaaataactgaccacaaagaggagagcaacggcctttgagttaaacagtcttggactgatcacatgctctgtcccccaccgtcgtgtgacttagccaccttctcttgctgagacttggcttgttcagtgacacagatggtggtaagaacacaccctgttgtgaagccctgagataagaaaggaccttcagagtcactctcagaaagtccaggaaagactggcccagcagcccaagaaagactatgctgtgtgcttgtaaagccagttactctgtcccctgtaaactagaagacagagcagcacagaccctttagagggcagtgttgcccattccatgtagagactggtacagaggtaatgtgaagttaccagcaaaaacaaacaaaatcaaaaacaaaaaataaaaacaaaacaaacaaacaaataaacccccaaacctctttatcctctgaaaactccagacaccatatctttatttatttaaaattagttatttaatttctgtgtattatttacatttgattttatttaactatagcatttagaaaataataagaatagtaagggtctgaataggaagggagtctgttaaggctctttccaggaggtcaggtttggatttctagagtctttttccctcagagaggactctctagtgtttggcacgatctctgtaagtaagatgggggagtcctgaggagagagagagagactaaactgatttttaaactggtaaatggagtcttgaattgtggaatatatgaatgattaagcctgtgtgtcctgaaggtactttgccagaaagcacttgacttgaaaaagaaaacctatttaattcaggagtggaggaatagaga

SEQ ID NO: 1120 - protein, 245 aa, Mus musculus
GMEKRAAWEPQGADALRRFQGLLLDRRGRLHSQVLRLREVAQRLERLRRRSLAANVAGSSLSAAGAAIVGLSLSPVTLGASLVASAVGLGVATAGGAVTITSDLSLIFCNSREVRRVQEIAATCQDQMRELLSCLEFFCQWQGRGDRQLLQSGRDASMALYNSVYFIVFFGSRGFLIPRRAEGATKVSQAVLKAKIQKLSESLESCTGALDELSEQLESRVQLCTKAGRGHNLRISADLDAALFF

SEQ ID NO: 1121 - DNA, 24847 bp, Homo sapiens
  misc_feature (1)...(24847): n = A, C, G or T/U
ctttaaaaataaaaaatcggattatgaagcagtaacattcaaaatcatattatattgaattaaaaacaggtaaactgtttagtggaatagatttcctagaagtagatattaacaatggtaacaaatcaatataagactagccagcaataacacatctatagaaaagtgtattttttaaataaaaaatgatcaaaattatattcatctgaagaagaattagcacccgctatgcactgtatataataaactccaggtgggtcaaattaggctaaaatgtttattgtggatattttctttttagttttatctaaccatcagtttccctttccctgacatagcaatcccattgtaatttcctagtgtgaaacttctccctgagtatatatgtaatgtgggtgggaaggtcaagttcttttaccatctcccacttgaaagctgaaggccattcacccctcttctccctgcccagtgcagacagtagatgggcacttgacctaagctcagccaacccagtggtcactcctggaactttgattcttaaactgatacaaggacaaaaggaaagagtggttggtcagtttcatcacacaggctgttccaattacaaaacgactgatgtcctttcagtttcttggttctttagaactccatggtcctttcccatgttcaagtatgtgttccctcagtctcatagcaataattcgcttatattagccagagcgagatttttactacaagttgagtattccttaaccaaaaggtttgggactagaagtgatttggatttcaattttggcaggattttagaatatttgcattatatgtttaccaattgagcatccctaattaaaaaatctgaaatccgaaatgttccagtgagcatttcctttgagcatcactctaaaatccaaaacttactgagcaccagtgtgacgctcaaaggaaatgctcactgcagcatttcagatttcagatttttgcattagggaaattcaacgtctcaacctgtgtatccagatggagacggcaattccaaagaacaaactgaagaggaagagggtataggaggtggatgatggtgtcacagttcacctggaaatatcttctctacaaggaaaggtgtttttttttttttttttttttttttttttttttgttgttgttgttgttttttgagacagggtctcactctatcacccaggctggaatgcagtggtgcagtctcggctcactgcaacctctgcctcctggggctgaagcgatcctcccacctcaggctcctgaatagctgggaccacaggggtgcacaaccacatctggctattttttttattttttatttttttgtggagacaaggttttgccatgttccccaggctggtcttaaactgagctcaagcagtccgccagccttggactcccaaagtgctgggattacaggtgtgagccactgtacttggccaggaaagcatcctgacaatgatctgatggtttacatttcttctgcttgcttctccctgtgggaggcatatacctctctatctttttgcttattttattttacatttttgagacagggtctcagtctgttgcccaggctggagtgcaatggtgtgaccatggctcactgcagcctcgccctcctaggctcaagcactcctcccacctcagcctcccaagtagctgaaactacaggtgcacacctcctcgtgtggctaatttttaatttctttttttttttatagagatgggttctcactgtgttgcccaggctgatctcaaactcctgggctcaagcaatcctcctgcctcggccccccaaagtgctgggattacaggagccagccagtgtgcctagctcctacccctttaatgttgggttggccacaacttgattggccaatagaatgccagtggatgtgatggctaccctgtctgagcagccttaggaatgattagtcaattttgcttccaaaacatattctgtactttatccactccattgcatcctaccaacattagccaaatctgagataatctctgtcaactacttcaataaccttctaactgtctcctggctttagttgtgtacctctgagaaccatccttcacacaactgtcacacaacaatgtcaaattaaccttgtaaggccacagatgaaagccttcaatggctccctctttcccacatggcactggaaagctgtcatgacttgtcttctacctaccccttaagcctcatcctttggccttccctgcttcccactttatgttcagcaacactaaacaccctggacactcctccattcctttgtccattctgttcctttgtccagactgccctcctctctctcctaatttttgtccaaataacttctgtttgactctcaagattcagctcaatatcagtgctcccagaaagtcttccctagtacttcctgggcatgtatttgccctgtgctttcttggtaccagcacacaccccggcacttccccaccttaaatttaaatgatatattctgtctttttctcttccaatagatttgccgtctcctggagggcagggactatatcttatttagcttttggtccccagactctagcctgatgtctggcacacagtaggtgttcaatacacattagtggagctgaaatcgaacaaattaaacattaatataagcaaattctgaaagccttctgcctctattcttacaaaagctggtggcattataaatgggttcttctggaaagcaatatagcactatataacaaaaacgatgaagatggtcattctccttgacttggtattttcccgtttgtgaatactcctcaaagaaataatccaaaggaaaaaaaatgtacacagatgtcctggcaactctagttataacagtgaaaaacctggaagcaatccaagtgtctaacagggaaatgactaagcaaacaatgggattattacatagctattaaaaaatgacagaggtgaggactatgtcaacatagacaagtgtgtatctatctgcaggaacgttaagtagaaaaaagaacacaggctagtgtttaaacactagtgattaaggatgtgtgtgtacattaacaaagattggaggctaatttggaggaatgaaaatggctggagtgcagtacttgttgagtctttattttcctgtgcagttccatgaatttttgacaataatacttgagattccatgcaatatagatatcctagaggtcttctgcagaataagtattctaagttataccaagctgtatagtccaagagaaaattttatgttaaattcttataaaattgttataaaataatgatatttctttaagtgaacaaagcatttttctttagttaaattcaacaagcaactatgagagcttgactatgttctagagcacttacattctggggaaattcaaagaaatcatgggcaaaaatcctcaggtgaatatgtgttattattttaatttgctttttttttttttgagacaatgtctggctctattgcccaggctggagtgcagtggtgtgatctcggctcactgcagcctcacctcccaggctcaaaccatcctcccagcttagcctcccaagtaccaagtagctgggactacaggcacacaccaccgaggcgcctgcctcagcctcccgaagtgctgggattacaggcataagccactgtgcctggccgaatttatttttattttggtgaatgtacatattagaacagatgacaaaggaaagtctgcaagacctttggactaaacctcacatttacaagttgtctcaattttattttttatttcaattttatttatttatttattttgatacagagtctggctctgccacccaggctggagtgcagtggagcaatcttggctcactgcaacctctgcctccggggctcaagcgatcctcccacctccaccttcccagtagctgggactgcaggcacaggccaccacacacagctaatttttgtagtttttgtagagatggggttttgccatgttgcccaggctggtattgtattcctgggctcaagtgattcttccacctcagcctcccaaagtgctgggattgcagggtcaccatgcccggcctgaattttatatttttgatgtctccaaaagaggtcctatatttagtcactgagatatacagttaagtattaaaaggaaaaagtcatcatcacataactttaaacttgtgccacttttccacttggtgcactatgaattaatattttataaatcctgtgactatattgtgaatagcaaaatactgacataagatatattacattgcaattaaaagaaataagccacaattttttatattccattatagaatttcttcatttttaaaaatcaactgagaggctaggcactgtggctcacacctataattccagcactttgggaggccgaggcgtgtggatcacctgaggtcaggagttcaagaccagcctggccaacatgatgaaaccccgtctctactaaaaatacaaaaaattagccaggggtggtggcaggcacttgtaatcccagctacttgggaggctgagacaggagaattgcttgaacctgggaggcggaggttgcagtaggctgagatcgcgtcattgcctaggcaacaagagcgaaactccgtctcaaaaaaataaaaaataaaataactgagagtctcaaaaaatggaggtggcccagtcctctgaaaggccttgagcgtaattatcactttatctttttttttttttttttttgagacggagtctcgctctgtcgcccaggctggagtgcagtggcatgatctttgctctctgcaagatccacctcctgagttcacgccattatcctgcctcagcctcccgaatagctgggactacaggcgcctgccaccatgcccggataattttttgtatttttggtagagacggggtttcaccatgttagccagaatggtctcgacctcctgacctcatgatctgcccacctcggcctcccaaagtgctgggattacaggcgtgagccaccgcgcccggcatactttatctttaaaatgtaatagttttaagtaggggcctaaagcaaatgggttgttgataactgtataaacacctcctaacatagtcctttccgctagacttactgtttctgctgccatgtaactggtggtcagaaaactaccagttctggctggccatggtggctcacgcctgtaatcctagcactttgggaggccgaggtgggcagatcacctgaggtcaggagtttgagaccagtttggccaacaatgtgaaaccccatctatactaaagatacaaaaattagctgggcatggtggtgcgtgcctgtaatcccagctacttgggaggctgaggcaggagaatcgtttgaacctggaaggcggaggctgcagtgagccgagatcgcaccactgcactccagcctgggcaacagagcaagactccgtctcaaacaaacaaacaaacaaacaaacaaacaaacaaacactaccagttcctagagcagtggttcacaaacctggctgcaggtaggaatcacctgtattctcccagatcccactccagacctcttgaattagactctccagggctggggcctgaagattcctatgcttaaaaagctctttctcgtccttcctacactgaatttcctcatggttcgaggactcagaattcaaactagtacagctaatgccgcggttcagctgcatcaagagtttaacacagtgacaacttgtctctacaaaaagtcaaaaaataaggcaggaggattgcttgatctcaggaggtcaaggctgcggtgaggcgtgatggtgccattgcactcccacttgagtgacagagtgagaccctgcctcaacaaaacaaaacaaaacaaaaaaagagttgaacagatctgaaggctagtttgaaggccaactaccattttcagtgtagtctctctagggtgatgtgttggaagtgcccaacaaacaatttaaaagagaagtttgaggatgtggtccacagatttttttttgtggaaactgaccacacagaacttttgaacaaaatgccttcatttgttcctaaaatttgttattgtgtctttactatatgaaattaaacaaatgctggctgggcatggtggctcatgcctgtaatcccagcactttgggaggctggggcaggtggatcacccggggtcaggagttcgagaccagcctgtccaacatggcgaaaccccgtctctactaaaaatacaaaaattagccaggtgtagtggtgcacgcctgtaatcccagcttcctcgggaggctgaggcaggagaattgcttgaatactgggaggcggagattgcagtgagctgagatcatgccactgtactctagcctgggcgacagactgagatgccgtctcaaaaataaataaataaataaaagtaaacaannnnnnnnnnnnnnnnnnnnnnnnnnnnnnnnnnnnnnnnnnnnnnnnnnnnnnnnnnnnnnnnnnnnnnnnnnnnnnnnnnnnnnnnnnnnnnnnnnnnnnnnnnnnnnnnnnnnnnnnnnnnnnnnnnnnnnnnnnnnnnnnnnnnnnnnnccgtaaaccgtcatcaagtgtcagttcttataaacaaggtgaagtaccagttgggttttttgtttgtttgtttgtttgtttttggagacagagttttactccgttacccaggctggagtgcagcggtgtgatctcggctcactgcaactgctgcctcccaggttcaagtgatcctcctgcctcagtctcctgagtagctgggactacaggagcacgccaccacacacagctgttttttttgtatttttagtagagacggggtcttaccatgttggtcaggctggtctcgaactcctgacctcaggtgatccaccagccttagcctcccaaagtgctgggattacaggggtgagccactgcacccggccccagttggtttttttttgttttttttttttttgctttttttttgagacaaggtctctatcatccaggctgtgttgcagtggtaccattatagctcactgcagccttgacctcctgggtgcaagtgatcctcctgcctcagcgtcctgaatagctaggactacaggtgtgagtcactatgcccggccaatttttaaattttttgtaaagatggggtctcattatgtcaaccaggctggtctcgaactcctgacttcaagcgaccctccctcctctgcctcccaaagtgctgggattataggcatgggccaccatgactggccaaagtaccaggtttttatgggcagtaaaactttagcccaaactgtcaattaactcaattttttttgcctccataaagaggcaaatacaaagaaaatgggctttcaacacagagaaaaacaaattccaagatatgggctgaggtcagtatacacgctgtctattttcctctaccttctggttcttcatcccacctctgtactatgatattgatgctctgaggaagaccctgtatcccagcaatattcctcatctataaaataaagatttaattgtgttcctctaaacccaaaacacacaggatgatgtccagggaagttagaggaacatgtgtcagctgaagaatcagtggtatgttccctcttgtctacctccccaattcgcgctggcccacatcccatttggagtgaccatgtctatggagatagaggaggatattcttccacttctaacctcaaaaggacacactggaggcatctagattgaggttacagctatcctttgaggagctgtaacaagaatatttggaagtggaccaaatctagaataatcaagtttgaaaggactatggttgtcctttctgttgctactgttgttatactgtgttgataaatacaaagtatagtcataaaggtgggggatttaatcatgttccagaatgatacggctgttaaggctttccaggtaagccagagagttgagataatccttattcaagtgagaaacgaatttggccctccttatctggaggagagggttagaaggacgatggatggatttggggacatgtagtaggactgaattcctaggctgagctccaaccacctctgaatgccccagagatatctatgttccatctggtctggtctgcagcaagtccacagaagctacattcacttttctgtgctgaattatcaaaataattgcccttcagcccatgcctcatgaccctgtagacagaatccactcatttccctatcacatgggctacaattgctacttcaaatgaaaacctgggaagccaatgccctattgtggttgaaagtgtacaattagctcctcatgcagcctgaccccactgatttttctgatgcatgtgacctggagtgtgccctttctgagaccgccaatgtcttctccacagctggagatgcccaaaactgcacgcagcacttcctgtgggtgtggccttgcattcttaggactgcagggtacccgctgcatgccaaatgatcccaggctccagccactcacagattcacaacgcttttaaaaatacagcagtggagtatgagcggctatgtcagatatgagggttttccaccccctcccttttcttttaaaatatgattttgtaatggtggcctcaagaaacactataattggtcagcctggggtgcgtttgaaggccttctctatcgcgtcattagctattctcaggaaaggcagggtatcccactgggagaatgacaacacacttgtttcaagttagggaagagcctgtggttctcttcctgcgttcaggggaaagcgaacacacaatgttcgtttcctaaatacgggatgtgctgtgctggcaggtcattttccaccatgtcacgtccttctagatgaaggcagcaggggtcatgacaggaaatggcaaattctcagaatgagacaaggctttcccagggcagccattggttctctggaactataaagcacactcatccagaaacagcctcagattttactttcctggaggcagacagaagtgaatggtaagtggggaaccctgaggcatatattcgggatgactttttctcattttctcttttcacctggaaaattatccctggtgggttggattatggaagcatggaagtaaaattaagtcctgtgaataaggagatgaggattctagactgggctctgtgaagaatcagctgcttctagaatctgatgtctgatgcaggcaattcttccagatgagaatgatttctgccctgatagctcagttttgaaatgctctatttctatggctcatttgccacttttaagaagttcctaataatgaagagtacagtggacatgaaggtgggaatctgcaactaggatgaatatacttttcccccaagatgtacaacttgttcgtatctttgtcagtcatcttcagttggcttcaacgtggtagaagttgttgaacaaaaattttggccactttattttattcaaccattactcatttttaaaagaaaactttcataacaaagagacataatggtattaatttaatgtgacttagtttaaatcaagcacccagcaaagactgatgtttctgaagatccaaggagccctagttagaataaacagtgcaaatctcattttaggcttgattctaagaaaagagcctggaagaatcacaagcagaagagttgcttcaggcaagcatctaacttagatgtttcttctgcttggtagaaaatacgatttttgaggttttggtgaagtctttttcattcattagagagagagaaaagtgtgttgcaaaactcctaggatccaattttcacatgatgaaagggctttgtaaactgtacaacccaccacttacaaagtgttatcttaagtagagcaaaggcctcagtactggagaagccttctaataccacgcccctcccagtttaaatcttatttaacacatagctgatgaagcccatcgttaacgttccctgggagagaagcagaagatagcattattcctatttccatatgcagagataaggtcctgagaacttgtgtggctccccccggattccagaacaggtctttgagaactcgtctcatgatccactggaaacagacccgttcccctagcgtggcagtggctgctccgctgaactcgtgccaagttcccgctggcgtccgggcagcagggcgggagcggcggctggcacggagactccaggctgaccgcgtgtctatgtccccgcagggaatggagaggccggcggcccgggagccgcatgggcccgacgcgctgcggcgcttccagggactgctgctggaccgccgaggccggctgcacggccaggtgctgcgcctgcgcgaggtggcccggcgcctggagcgcctgcgcaggcgctccctcgtagccaacgtggccggcagctcgctgagcgcaacgggcgccctcgccgccatcgtggggctctcgctcagcccggtcaccctggggacctcgctgctggtgtcggccgtggggctgggggtggccacagccggaggggccgtcaccatcacgtccgatctctcgctgatcttctgcaactcccgggagctgcggagggtgcaggagatcgcggccacctgccaggaccagatgcgagagatcctgagctgcctcgagtttttctgccgctggcagggctgcggggaccgccagctgctgcagtgcgggaggaacgcctccatcgccctgtacaattctgtctacttcatcgtcttctttggctcacgtggcttcctcatccccaggcgggcggagggggacaccaaggttagccaggccgtgctgaaggccaagattcagaaactggccgagagcctggagtcctgcaccggggctctggacgaactcagcgagcagctggagtctcgggttcagctctgcaccaagtccagtcgtggccacgacctcaagatctctgctgaccagcgtgcagggctgtttttctgagaacatcctttccccctaatgaccgaggccagcaaatcatcctcatgggatgctccagaatttgtagctcccttaggaaaacaccaagctgggttaggagccgaaggcaaaggatgagaaaaactgtttttgaagtgggcaggtccccaaagcccttcttttcccatcactgtgacatctgcctgggcttgagtgctacggacttttcagtcttcctagtggaaaaatgtgacccaaaaactctttttcctttatcaaaaactttctgtctaaacacagctgggcaggcactcctgttttaaagttatttcggggtccctgaccctgccctggtggcttggcctgagactggagagagtgccatcctctgggtcctctccaagtcctactagtctttgaagtcctcaaaatgtgcgtgaggaaggcgtttgcctctattccagaatttctgatacaaagaactccagaatccagagcaaatcagcccttctctgaacgttgtaggatggttcagaacccagagaggaccctggtgctgatatctcctcctcttccctttcccctcagcttacttactcccagatgcggcctgggtatgaagtaggcctttcctgagtggctcccaatccagtcctccaagtactcagaggggaagcccgtgaagccgtcatctaagtcctgctccctcacatgaagctgagggccagatagatggagcgactgccaacttcatttcccgacatcattgtgttcagaagagagtgatgggttttgagttagacagtcctgggcttgagacaggctttgtcactactgtgtgagtgtagccacctaatctctctgagactgtgtaaaacaaagatgataaaatctcaccctgttgtgagatattaaatgagccaaagtgcctagcatgatggtgctggctcatatagtgtagtccctggaatggcaaattaacatcacccaggaacttgttagaaaggcaaattcttggacacaaccctcctgatttatggaatcagaaactctggctgtggggcccagcaacctgagtttaaacaatttctctgggtggttctgcggcacactaaggtttgaaaatcactgcaacaaatgctaacttctaatccccttgatgagctttcacgaagtctcacggcttctctagggactccatggtcttcagagtcgttcacagatgaccaaggacagactgtgtcccagaagccaaaatgagagagagagagagagagcacgcgtacgtgcaccctggggcagtgtctcaccgtatgaacaagggatgtaacactaaaagcccattagggggcagtgtttcccgcctgttgtagaaactggtacagaaaggaatatgaagttcctgaaactgacctttgtctattattaccttctctgaaaagtgccagtccatgtattttttatttattttaagtttgtaatttaatttttaattattgtttagtgtttgcatttaattttatttaatcaccacatttagaaaataataagagcaagtttctaaatgggagactgctgaggctctttgcaagagatgagattaagtttgagtttctaaggcagggcatgagctggaaatagcattgctttccttgattgtctctctccttcagggagattctttttctctagtgttttaagtgatcctttgaagtaagtgtggagagtcttgaatggcaagaccaggagctgagtttaagcttgtaatggaagcttgcattgtgggatatataactgaggaagcatatttatcctgaaggtattttgccagaaggtatcacttgacctggaaaaggaatctatttagttcaggaaagataaaaagtttagaggtatgtgaaggaagcacttagaacttgcaagcctgatgtcctatcaagttatgtcttctgggtgacagacaaaatcgcttgtcttatggtggtgatgtgttgcattttcactttggggtctgtaagaaactgtcagtgaaaatatgtacaattccttcaatttccattcttaacaactgtaatgttgaaaaataagttgaaaagtctttgggaccatacatgcaaaaacggtgcctctgttacttaattatttaatattctataaatgtacccaatctgtccgcacccttcccagtgatggggcagtatgtctgaggaagtataatttcagtactggggtcggggagaggaggtgatgtttctacatttttattttttctataaattgcaattggtctgtatgctggtttattttgaaatttatattggtttcttttcaagctggtgtcatctcctagactgtttcacccagatgctagcattttttttttttttttgagacagagtctcactctgtcacctaggctggagttgcagtggtttgatctcggctcactgcaacctccgactcctgggttcaagcaattcttctgcctcagcctcctgagtagctgggattacagatgtgcaccagcacacccggctaattttttgtatttttagtagagacagggtttcgccatgttggccaggctggtcttgaactcctggccttatgtgatccgcccaccttggcttcccaaagtgctgggattacaggcatgagccacctcgcctggccagatgctagcattttagatcaaacaattcattttagatgaattgttttgtttcacaatcattttaaatcattttagaatgtacttcacattattagttgtgttatggcataaaggtacaaccattccctaactccatcttttattaatgcttaagtttaaattatattcttccaatgcctaagctattccctagaattaaactgggcacttttggaagcagcaacagtaacagcagcagcaaacttttcctctcatattttgggtgtatcaaaagttctagacttttgaagttatgatttcagtggcccactttatttctaaggaagagtgtctactttggaacgatactttgcacatagtaggaactcaagaaatacatttgaataattataattaactgtttagctatcttaatgagaatttgttgacaacaaaagatcatccatcgccttatgtgtgagtaagattggagcctctatcaagatttagtcaagttcagttagattgattctagaaacaaatatttatttctttcttttacggggatgtgaataaggcttttccttaaggccttcattctttaaacaaacaggttgaaatggtatgttgtaaaagagaagacgggagagaggtatttagatgataagtgtacttcacaaaaatgccaaagtttgaaaaataggtatgtttgttctaaatgtttaagtgcttctctgttaggttctggggcttgcaatcatttgaattgttctgtttcacaataaaggagattcactgggttctgcattttcaggattcaatagaactgctccattaaaaaaataatccttagcaagcattcgaatcctaactgctttgatgcacttgccctcgggcacctgtcatttccaatatggtaggtgtcaaagtcaaaagtatttactgggagaaaaaagagaggagtggttgtagaagtctccctaaatcagacatgtcaagcaatcagccaacgtggtgtatttctcattcaatattttagtgtgaattgagacactgagataaagacatcgtgcagagataaatggggatacagttaaatgtagcaactcttgagttcattttttcccactgtagcaaaattaatgctttctctttattgaaataaattgctcattcctcaaatttttttatctttctgtaattaatttcctagttctatgtttccttgtgtatgaattagtaactttgaaaaagggcagatgtttaatcattttcacttagaatattcagatcaaactatatgaatcatttttttttaataatcaatgcatacacaggaattcccttttgcctagaaatcagacttccagcagtctcaaaacctttgaacataattacaacctgggaaggaattgaaaggaaacctagaatcagccaaattagccttcacaacatccaaacactaaagagaggtgggcagggagggtgaagggcagcatgtatatcaggaaagaaaactttcccgtaaatctctgagggacttcaccttgcaagccaccgatcttgaccatgcaaggcaggctgggaaatgtagtatttttagctgagaacaacgctgcccctaatatacctaagattctcttggtaagaaagaaaaggagggtgatcattaagtagggggtccagcaatttaaacaaaaagcctattgtggttgcggcagccagttggggacgactactctggagacgacctcactatctcagtgccagctgcaccttggaaacattcctgggtctggaggctgcactgttaataactgtacaaccaaaaaaggctgtgttggcaggcccctgactgtttgcagaggccagccgcaagctgggatcctatctttgctgaagcatatggtattcctgtagtaacaagtgtccttttagttaattgcaataaatctcttgttgagttgacaggaggttgggatgttactttttgctcctggcaaactcataagagggaaagtaaaccctgctgtggtctggaataggacaaagagtgagcccttagatctgaaaacaatctcttagcaaccagagagctgttaggagaggggaaatcgtgctgatgaagcgagacccatcgtccaggaatgcacattaggggtcctcagcacccccaaacctgactagcattagcaccgggttgtggagagaaggccctctaatgtggtctttgcctgcacgcatagagattatctatatgaagctacatctgcagaaaatgatgtttaatccaattttgtatttacactaaaaccccagaggtgggaggacaggcaggcctgtgacctgattccccctgagctttagccatgggtcacggccaaggcatctgcctcccttacacacaggagcagccagatcctggcctcctccagcatttgtgtgaatacggttgccaaattcaccaaaataattataactgggagaagctacacaaaaagggtaggggtgatgtctaaagtctttcttttaggcgaaacttctttttctacgctccccggttgataagcagacatttctttctgccctcactttttattaaaactgcactctcaaaatatcatttaaaaacaatatttttttcagtgcttaaataaaatgacatttcaataatattgaacatacatgtgggatatttaacaataacaatagctaacatttattgagaactcactagatactcttctaagtacgatttgacctgtatcatttcatttaccttacaaaaatcttatggtgtgcacactataattaccctatattattagataaagtaaggaatttgagaggttgcattgccagcatgaggtgccccagaatttgaattctggcagcctgactccagagttatgctcttagctattcttttccttttttttttttggagtcttgctctgtcacccaggctggagtccagtggcatgatctcagctcactgcaacctccgcttcctgggttcaagcgattctcctgcttcagcctcctgagtagctgggattacaggcgcccaccaccatgcccagctaatttttgtgtgtgtgtgtatttttagtagagatggggtttcaccatgttggccaggctagtcttgaactcctgacctcaagtgatccacacaccttggcctcccaaagtgctgggattacaggcatgagccgctgtgcccatccaatgctcttggcttttctgattttttttttttagacggagttttgctcttttcgcccaggctggagtacagtggcatgacctcagctcactgcaacctgtgcctctcgggttcaggcgattctcccacctcagcatcctgagtagctgggattacaggcgcccaccaccatgcctggctaatttttgtatttttggtagagacagggttttgccatgttggccagggtggttttgaactcctggcctcaggtgatctgcccatctcagcctcccaaagttctgggattacaggtgtgagccactgcgcctagccaatcctagcaccttgggaggccgaggcaggtgggttgcttgagtccaggagttagagaccagcctgagcaacatggtgagacctcatctgtacaaataatttttaaatgagctgagtgtggtgttgcacacctatagtcccagcttctcaggaggttgaggtgggaggatcacttaagcccaggaggtcgaggttgcagtgaaccgtgattgggccactgcactccagccagcctggggaacagagcaagaacctgtctcaaaaaaaataaaaacatctcctggcagtaacagtctcatctaggatgagtaatcttatgccagtaggctagtcaataagaaaaaaataaaatatagctttgcaagtcactagtatttataataaacagtgtgggtgtgatttgaaagttataaaacttttgctctgatcataaaaacctatgtatgggtttttatggtggctgggcacagtggctcacacctgtaatcccagcactttgggaggctgaggtgggaggatcaactgaggtcaggagttcaagactagcctggccaacatggtgaaaccccgtctctactaaaaatacaaaaattagctgggcatggtggcaggcacctgtaatctcagctactcgggagactgaggcaggagaatcgcttgaactcagaagacagaggttgcagtgagctgagatcacgccactgcactccagcctaggcgacagnnnnnnnnnnnnnnnnnnnnnnnnnnnnnnnnnnnnnnnnnnnnnnnnnnnnnnnnnnnnnnnnnnnnnnnnnnnnnnnnnnnnnnnnnnnnnnnnnnnnnnnnnnnnnnnnnnnnnnnnnnnnnnnnnnnnnnnnnnnnnnnnnnnnnnnnnnnnnnnnnnnnnnnnnnnnnnnnnnnnnnnnnnnnnnnnnnnnnnnnnnnnnnnnnnnnnnnnnnnnnnnnnnnnnnnnnnnnnnnnnnnnnnnnnnnnnnnnnnnnnnnnnnnnnnnnnnnnnnnnnnnnnnnnnnnnnnnnnnnnnnnnnnnnnnnnnnnnnnnnnnnnnnnnnnnnnnnnnnnnnnnnnnnnnnnnnnnnnnnnnnnnnnnnnnnnnnnnnnnnnnnnnnnnnnnnnnnnnnnnnnnnnnnnnnnnnnnnnnnnnnnnnnnnnnnnnnnnnnnnnnnnnnnnnnnnnnnnnnnnnnnnnnnnnnnnnnnnnnnnnnnnnnnnnnnnnnnnnnnnnnnnnnnnnnnnnnnnnnnnnnnnnnnnnnnnnnnnnnnnnnnnnnnnnnnnnnnnnnnnnnnnnnnnnnnnnnnnnnnnnnnnnnnnnnnnnnnnnnnnnnnnnnnnnnnnnnnnnnnnnnnnnnnnnnnnnnnnnnnnnnnnnnnnnnnnnnnnnnnnnnnnnnnnnnnnnnnnnnnnnnnnnnnnnnnnnnnnnnnnnnnnnnnnnnnnnnnnnnnnnnnnnnnnnnnnnnnnnnnnnnnnnnnnnnnnnnnnnnnnnnnnnnnnnnnnnnnnnnnnnnnnnnnnnnnnnnnnnnnnnnnnnnnnnnnnnnnnnnnnnnnnnnnnnnnnnnnnnnnnnnnnnnnnnnnnnnnnnnnnnnnnnnnnnnnnnnnnnnnnnnnnnnnnnnnnnnnnnnnnnnnnnnnnnnnnnnnnnnnnnnnnnnnnnnnnnnnnnnnnnttatttagtttccttgacagcttttttttcttctccagtcttaaggttcaagtttccctgagcctcagacccaggctgccattcccctgaccttgtcacacagcccttcactgagcatgttcgtttccagggtctcacccgtcctggactggatgttggtatggatgaaaccagctccacggccgggcgcggtggctcacgcctgtaatcccagcactttgggaggccgaggcgggtggatcacgaggtcaggagatcgagaccatcctggctaacggtgaaaccctgtctctactaaaaatacaaaaaattagccgggcgtggtggcgggtgtctgtagtcccagctactcaggagtctgaggcaggagaatggtgtgaacctgggagacggagctggcagtgagccgagatcgcaccactgcactttagcctgggtgacagagcaagactctgtctcaaaaaaaaaaaaaaaaaagaaaccagctctaaaggattctttggggtcaagttgaatttggtgggtattatgtcaaatgaaaacaaatgaaatcattgtctgaatgaaaaaggttgcaggaagagtgcaccaaaacaaaagccctatctgcgttcctactatgccattcctctcattgaagttctatacctgactccagccagatgcagtcttgctctaatctgaatgtctaagagcaatctgtgtgtctcttatgcagacgtatcacttgatacattttattaaatatatatgtgcctaccccaaggctcttaaggacagaaaccacatcacagatattgttaaatctcccagtgtctcttcagctcctgccacaggagatgcccagtagcatttattgactgaacaagcacagtttatcctcatggatatgctggcattccttctcagaacatctgaagctaaatttatctgtaaaactggcccagtttcacaactcttctacttctaccaaaggcaacatcagtctgccagtggcctacccggaaatatcatcatctccaaatcttcccctttcttacttctctgatatacttttcttttcttttcttttcttttttttttttttgagacagggtctccctctctcacgtgggctggagttcagtggtgcgaccatggctcactatagtctcaacctcccactgtgatcctcccacctcagcctccagagtaactgggaccataagtgctcaccaccatgcccggctaatttttgtatttttagtagagatggggttttgccatgttgcccaggctggtctcgatctcctgaactcaagcaattcgactgccttggcctcccaaagtgctgggattataggcatgaactaacactcctggccactctaatatatttttgccaaagtatttccttcccattaaatgtctctcccatccattttgatccaacccactgctatcacaaccatctaggctttacctcctaatacctgcaatgaccttcaagctgtttcttcctgattccaacttctttctgctcagattcacaccatacttcaatccttgattcatttacataactcccagatttctttatattccaatcaaatggaacatgaccttatctaaaccttgactctgaatttgagtacacagcccagagaactgctgagttcctgtggttttggctgtgacggataataccatgaagggctaacaggaactcaattctgtggttatttattcattcatttatttttatttatatttattatatttatattacttatttttatagtattattatatttatttatttattatttttattatttatttttgagatggagtctcgttctcccaggctggagttcagtggcatgatctcagctcactgtaacctttgcctcccgagttcaagcaattttcctacctcagcctcctgagtaactgggattataggcacttgccacgatgcccagctaatttttgtaattttagtagagacagggtttcaccatgttggccaggctggtcttgagcacctgacctcaggtgatccacctgccttggcctcccaaagtgctgggattacagtcgtgagctactgcacctggtctaattctgtggtttttaatgagaaaacgatgttgtagtctagtgactttcaaaacaggctgagtcaggaagaaaaggtcccagggtggtggtgcagggaagcctcgagaggggaggaatggggaaagcagagagagacaaacaggagtcggcaggtcacgtcatcactaggtgaatttcctccatgaaattgaaggcctagtgcttctgactgacttggagagaggacttggaccaccacacaccaccaaggcaaactggctgtacgacctttaatgatgggaaacaagagcagagaaaaggcagttgcatattgaacctgatatcttccctccaaacgctcttcaacatgtgcagttgtcatagaaacccaagcccggccctaggctggccccaactcccttgttaatgctgtagggtttgtaactgaatcaaaaatgtatggtggtgacaatgaacttcctgaccttagaagagctttcctcaccagactgacctcctttatgatgttatcttaagaggggaagacttcagagttatctggggcaccatgttccatctccccagcatggccagttctaaaagctttctaatcaagttggtaatccacactgacctctcagaagaggacaggctggaaacggtggctcacacttgtaatcccaacactttgggaagccaggggggaggatcacttgagcctaggagtttgagaccagcctgggaaacatagcaagacaaaaatagactctacaagacctacagaaaaatagaaaaaaagccaggtgtggtggtgtgcacccgtggttccagatacttgggaggctgaggtgagaggattgcttcagcccaggatgtcttggctgcagtgagctgtgattgtgccactgcactccagcctgggcaacagaggaagaccctgtctcaaaaataaataaataaaaagaagaggattggactagaagacaccatttcctgtggtgtgaaggagctattaagggagacattttttgtttggtgatttacagttagaccttgtcctcacattcaagttggaccttgtcctcacatccctgcttcatacgtagaaagttgttgggtctcttctctttcccaagaatgagcaatcttggcctaaggtaataacctgtctctagaagctcaagttagtgtcctacttcttttatacacaaacatgtgatctttccacatcacaactgtggcctcatctttccttttcttcatcccttcccaatacacacccacagacacacagatattcatttattcaacaaaagatttattgagcactcactcaatacctatatgctaggtatttttctaggcacctagcatagagtagtcaaatatctctgccatgagggagttcgtatctattgatggtagagaatgcagacaaaaaaaaaaaatgaagaagcaaatatcagccaagcatgatggctcatacctgtaatcccagcactttgggaggcagaggtggaaggatttcttgaggccaggagttcgagaccagcctgggcaacatagtgagaccacatctcttaaaaaaaaaaaaaaaaaaaagagaagcagcagaagaaaaagtagatatctagtttgtgagatggtatatatatttttcctataacttctgtaaaaaattaccaaaattttagtggcttaaaacaacacaaataatttattatctcacagtcagaagtctgatgcaattgtagctcaatgggctaaaatccagcagtcggcagggctatcctttttcctagaggcgataagggagagcgtgttttcttgccttttccaccttctagaggctcctgcattccctggcttgtggccccttcctccatcttcaaagcctgcaatgatgggttgagtcttctcacattgcatcgctctgacatcttcttttgccttttcttccacttttcaagacccttttgactacattgggcccattcagacaatacaaaataatctccttattttaaggtcagatgattagcaaccttaactctatctgcaacctaattccccattgccatgtgagataacatgttcacgcattccagggattaggatatgtgcatccttgggggccattgttattgtttcccacatgttgataagtgccatggagaaaaacaaagcagggacaagggagagggagtgctgggggggagaggggctggaagtccttaatgacaagggatgtttgagtgaagagctgaagttggtgttggagagagccacaagggtatctgagtgttccaggcagaggaaacggagagtgcaaaggctctgaggcagaagcatgaccgctatgttattttggtgtttttttttttttttttttttagatagagtctcactctctgtcgcccaggctggagtgcagtggcaccatcttggctcactgtaacctccagctcctgggttcaagcaattctcctgcctcagccttctgagtagctatgattataggtccacgccaccaggcctggctaattttttgtatttttagtagaaacggggtttcaccatgttaaccaggctggtctcaaactcctgacctcaggtgatccacccacctcccaaagtgctgggattataggcatgagccactgtgcccagccattttttgtatttttagtagagatggagttttgccatgttggccaggctggtcttgaagtcctggccccaactcttggcctcaactcctggcctcaagtgatccacttgcctcagcctcccaaaatgctaggattataggcgtgagccaccacgcccagctgacttatgttttcaaaggacccctttctgctatgttgagaattgactgttgagaggtaagaatcaaggcaagaagactagttaggaggctactgccatgacccaggtcagaaatgttggtagctgagagtggagaaaagtagtcagattccagatgtatgatgaaagtagacctgcaggacttgttgacagattgggtgtgggaggtgtaagagaggagtcctggcttgagtaatttagaaggatgacatggctatttcctgatgtggggaagactgtgggagaaacacgctggggaggagtggagtcaggagttgagttttagaggtattaagtttgagattcctgacatatccctgtaggcagctgaatatatgagtctggaacccaaggaaggacttagaagggagatatcaattggagaatcctgagcaagtaggtggtattaaaaatcatgagactggatgtggccactaagagatgagtgaaagtagggaatatagagaataggtccgaggattcagccctgggtactctgacatttagggtggggagtgggtgggaatgaggaagtactagctaggaagactgagaaggagtggccagcaagacaggagaaaaaccaggagtctccagtgtattgaaacccacgtcggctgggcgcggtggctcatgcctgtaattctagcactttgggaggccgaggcgggtggatcactaggtcaagagattgagaccttgggaggccaaggcaggcggatcacaaggtcaggagttcaagagcagaccggccaagatagcgaaaccccatctctattaaaaatacaaaaattagccgggagtggtggcatgtgcctgtaatcccagctactcgggaggccaagacagagaattgcttgaacccaggagacggaggttgcaatgtgtcaagattgcgccactgcactctagcctgggtgacagagtgagactccatctcaaaaaaaaaaaaaaagggagagagagagagagagagatcgagaccagcctggatggtgaaaccccatctctactaaaaatgc

SEQ ID NO: 1122 - DNA, 4847 bp, Homo sapiens
gatgaagcccatcgttaacgttccctgggagagaagcagaagatagcattattcctatttccatatgcagagataaggtcctgagaacttgtgtggctccccccggattccagaacaggtctttgagaactcgtctcatgatccactggaaacagacccgttcccctagcgtggcagtggctgctccgctgaactcgtgccaagttcccgctggcgtccgggcagcagggcgggagcggcggctggcacggagactccaggctgaccgcgtgtctatgtccccgcagggaatggagaggccggcggcccgggagccgcatgggcccgacgcgctgcggcgcttccagggactgctgctggaccgccgaggccggctgcacggccaggtgctgcgcctgcgcgaggtggcccggcgcctggagcgcctgcgcaggcgctccctcgtagccaacgtggccggcagctcgctgagcgcaacgggcgccctcgccgccatcgtggggctctcgctcagcccggtcaccctggggacctcgctgctggtgtcggccgtggggctgggggtggccacagccggaggggccgtcaccatcacgtccgatctctcgctgatcttctgcaactcccgggagctgcggagggtgcaggagatcgcggccacctgccaggaccagatgcgagagatcctgagctgcctcgagtttttctgccgctggcagggctgcggggaccgccagctgctgcagtgcgggaggaacgcctccatcgccctgtacaattctgtctacttcatcgtcttctttggctcacgtggcttcctcatccccaggcgggcggagggggacaccaaggttagccaggccgtgctgaaggccaagattcagaaactggccgagagcctggagtcctgcaccggggctctggacgaactcagcgagcagctggagtctcgggttcagctctgcaccaagtccagtcgtggccacgacctcaagatctctgctgaccagcgtgcagggctgtttttctgagaacatcctttccccctaatgaccgaggccagcaaatcatcctcatgggatgctccagaatttgtagctcccttaggaaaacaccaagctgggttaggagccgaaggcaaaggatgagaaaaactgtttttgaagtgggcaggtccccaaagcccttcttttcccatcactgtgacatctgcctgggcttgagtgctacggacttttcagtcttcctagtggaaaaatgtgacccaaaaactctttttcctttatcaaaaactttctgtctaaacacagctgggcaggcactcctgttttaaagttatttcggggtccctgaccctgccctggtggcttggcctgagactggagagagtgccatcctctgggtcctctccaagtcctactagtctttgaagtcctcaaaatgtgcgtgaggaaggcgtttgcctctattccagaatttctgatacaaagaactccagaatccagagcaaatcagcccttctctgaacgttgtaggatggttcagaacccagagaggaccctggtgctgatatctcctcctcttccctttcccctcagcttacttactcccagatgcggcctgggtatgaagtaggcctttcctgagtggctcccaatccagtcctccaagtactcagaggggaagcccgtgaagccgtcatctaagtcctgctccctcacatgaagctgagggccagatagatggagcgactgccaacttcatttcccgacatcattgtgttcagaagagagtgatgggttttgagttagacagtcctgggcttgagacaggctttgtcactactgtgtgagtgtagccacctaatctctctgagactgtgtaaaacaaagatgataaaatctcaccctgttgtgagatattaaatgagccaaagtgcctagcatgatggtgctggctcatatagtgtagtccctggaatggcaaattaacatcacccaggaacttgttagaaaggcaaattcttggacacaaccctcctgatttatggaatcagaaactctggctgtggggcccagcaacctgagtttaaacaatttctctgggtggttctgcggcacactaaggtttgaaaatcactgcaacaaatgctaacttctaatccccttgatgagctttcacgaagtctcacggcttctctagggactccatggtcttcagagtcgttcacagatgaccaaggacagactgtgtcccagaagccaaaatgagagagagagagagagagcacgcgtacgtgcaccctggggcagtgtctcaccgtatgaacaagggatgtaacactaaaagcccattagggggcagtgtttcccgcctgttgtagaaactggtacagaaaggaatatgaagttcctgaaactgacctttgtctattattaccttctctgaaaagtgccagtccatgtattttttatttattttaagtttgtaatttaatttttaattattgtttagtgtttgcatttaattttatttaatcaccacatttagaaaataataagagcaagtttctaaatgggagactgctgaggctctttgcaagagatgagattaagtttgagtttctaaggcagggcatgagctggaaatagcattgctttccttgattgtctctctccttcagggagattctttttctctagtgttttaagtgatcctttgaagtaagtgtggagagtcttgaatggcaagaccaggagctgagtttaagcttgtaatggaagcttgcattgtgggatatataactgaggaagcatatttatcctgaaggtattttgccagaaggtatcacttgacctggaaaaggaatctatttagttcaggaaagataaaaagtttagaggtatgtgaaggaagcacttagaacttgcaagcctgatgtcctatcaagttatgtcttctgggtgacagacaaaatcgcttgtcttatggtggtgatgtgttgcattttcactttggggtctgtaagaaactgtcagtgaaaatatgtacaattccttcaatttccattcttaacaactgtaatgttgaaaaataagttgaaaagtctttgggaccatacatgcaaaaacggtgcctctgttacttaattatttaatattctataaatgtacccaatctgtccgcacccttcccagtgatggggcagtatgtctgaggaagtataatttcagtactggggtcggggagaggaggtgatgtttctacatttttattttttctataaattgcaattggtctgtatgctggtttattttgaaatttatattggtttcttttcaagctggtgtcatctcctagactgtttcacccagatgctagcattttttttttttttttgagacagagtctcactctgtcacctaggctggagttgcagtggtttgatctcggctcactgcaacctccgactcctgggttcaagcaattcttctgcctcagcctcctgagtagctgggattacagatgtgcaccagcacacccggctaattttttgtatttttagtagagacagggtttcgccatgttggccaggctggtcttgaactcctggccttatgtgatccgcccaccttggcttcccaaagtgctgggattacaggcatgagccacctcgcctggccagatgctagcattttagatcaaacaattcattttagatgaattgttttgtttcacaatcattttaaatcattttagaatgtacttcacattattagttgtgttatggcataaaggtacaaccattccctaactccatcttttattaatgcttaagtttaaattatattcttccaatgcctaagctattccctagaattaaactgggcacttttggaagcagcaacagtaacagcagcagcaaacttttcctctcatattttgggtgtatcaaaagttctagacttttgaagttatgatttcagtggcccactttatttctaaggaagagtgtctactttggaacgatactttgcacatagtaggaactcaagaaatacatttgaataattataattaactgtttagctatcttaatgagaatttgttgacaacaaaagatcatccatcgccttatgtgtgagtaagattggagcctctatcaagatttagtcaagttcagttagattgattctagaaacaaatatttatttctttcttttacggggatgtgaataaggcttttccttaaggccttcattctttaaacaaacaggttgaaatggtatgttgtaaaagagaagacgggagagaggtatttagatgataagtgtacttcacaaaaatgccaaagtttgaaaaataggtatgtttgttctaaatgtttaagtgcttctctgttaggttctggggcttgcaatcatttgaattgttctgtttcacaataaaggagattcactgggttctgcattttcaggattcaatagaactgctccattaaaaaaataatccttagcaagcattcgaatcctaactgctttgatgcacttgccctcgggcacctgtcatttccaatatggtaggtgtcaaagtcaaaagtatttactgggagaaaaaagagaggagtggttgtagaagtctccctaaatcagacatgtcaagcaatcagccaacgtggtgtatttctcattcaatattttagtgtgaattgagacactgagataaagacatcgtgcagagataaatggggatacagttaaatgtagcaactcttgagttcattttttcccactgtagcaaaattaatgctttctctttattgaaataaattgctcattcctcaaatt

SEQ ID NO: 1123 - protein, 295 aa, Homo sapiens
MIHWKQTRSPSVAVAAPLNSCQVPAGVRAAGRERRLARRLQADRVSMSPQGMERPAAREPHGPDALRRFQGLLLDRRGRLHGQVLRLREVARRLERLRRRSLVANVAGSSLSATGAAIVGLSLSPVTLGTSLLVSAVGLGVATAGGAVTITSDLSLIFCNSRELRRVQEIAATCQDQMREILSCLEFFCRWQGCGDRQLLQCGRNASIALYNSVYFIVFFGSRGFLIPRRAEGDTKVSQAVLKAKIQKLAESLESCTGALDELSEQLESRVQLCTKSSRGHDLKISADQRAGLFF

SEQ ID NO: 1124 - DNA, 52694 bp, Mus musculus
  misc_feature (1)...(52694): n = A, C, G or T/U
gctagtgtacgtgagccactttccactttcctttgtgaaatgggaacaggagaacacctaagcatgtggacagcacaggaagccttggatcagcagacagaaggttgagtccttctgtcccaggggttggagagaagttgtttctcaagtcaccacacccatcttagctcctcaaatactccatcgtgagcaagtgggacaggaaatggcaccaagcagactctggttacttcctagctatgttttaatgacagagacctgcctgttctgaacacagagaccctggtttttgtctcctgtctgtcctctccactgcactgcttgaagccctgtctgcttaatggaagcggcgtgttacattccctgtgagatgacgctgtgtgttctgggcttctcctgatggcacatcttgtgacatcattgctggcctgagtcaaatgcctcaggaatgtgttctctcctaactgttctttaaggtcactgacaggaaagggaggccattttaaagtccattctcctcctggtcacctctcatcacactgctggctgtggtgagactccatgactgagcaatggcctgaggctcggaatatctggaaatgtctcttgaggaaggtcgagggccctggatttatatcaaagtcttctgttaacttcctctttgaggccttttttctgagcagatgataaaacagagctgggggtggggggatgactcggtcacaagagtacttgccaaacaagcaagagtaccaagtatggtccccagggcacgaggaagaaagctgagtgtgttgacacacgcttgtaatcccagcacagagatgtaggaacactgatccctgagaccgctgggttctaacaaaaatgtgggagaatgacccttgaggttaagaactggcctccacgtaggaaagcatacctgggcatacagcgcgcacgcgcgcgcgcgcacacacacacacacacacgcacacgcacacgcacaatcaaatagcatagcatatcaccaacggaattcaacaaactctgttagaactgaagcagttccctggagatgaagctttctaccttacttctaagccaccatgttgcctccttcctgtctctgcccgtccttcagagcctgccaactccccttgagaagtgccagtaatcctccagaccgtggcccagtgtgttgtttcaggtataatagcatttgttaatttgttattctaccaagatgcaatttgtgagtggatgataaagctgtaattcccacagtggagacgggggctcttccttcagtaaacacagtgaatctatcctggggaggcgtgagaaggaacaagtccccaggtgtcctctgacttggggagcttagcgtctaccatgatgaggtgaagtcatgaaagtgagccttgacagacctcagaaactgatgttgccagggtggaaaagacagtgtgtcccactaacacctgggagaggaatgagtcatttctaccttcaggagaatcagaaataatgtatgaaaaagacacatggtaatagcgtcagtatttataataaaacaagaactacatttaaaggtattgtatttagtcctctataaggtaggcatttgctctgttttgtgatgtgaaggctaggctggacgttaatgaagagttggttttgtttgtttgtttgtttgtttttgaggtagaaccgagagggtagagaaaggcactgttcattggtgggaatcggcagtatcaaggcgtgggtgttgggaagccagaggcatctactggcaccgtgcaggtcagtgtggttggagcattggaagggtcaaagccagttacaaaagagccacgcgtgcaggctgtgccggagcagcacatcaggaagagacagtaagacaggcctgctggtccttctcatccctgcagccaaacaagaagctggggttctctgtgggtgtagggaacccaaactcaggtcctcctgtatgcatggcaggccgtcccatccctgatctctttgctgtgacagtgaaggttggaggtgccctttcctcacgaaggacataagagtctgaaaggtcctcatcacttcttctagtctccatcttaaatgagggtaaagcttcctatttaccaactgaaatctgtttatagtttgtctgaatactggaaacagcttcatttattagtgcaatggggtctctttgggggactgtacccatcatggacacctgcatctgtaatcaataatgaataataattggcagtagcaaccactgaccagttagctatgcaggaagcagacagggagaggcgcctaggtcgtggccccttcactgcctgcctgtgtctccattcggggctgacttggatctgtctgctcctgtatctatgcttgactccatgggtacaggcttctgataactcctgttttactccttcaacccagggtctatgaacaaggtttgggcaaattacctgaaattttaatctcccaacaaatggcctcctggcctcctttgtcattctcaggcagcccctcatgattgatgatgcctgaggtaaaacagcgcctgcatctgaggctgagttacttccatgtagacaatgaaggagtgagaggaacccacaccttcttagactggtaagatgccatgcagtgggagtccatactgtgtgtgcagatatgaagctgtatgccgcgctctgagcctgaggagagggggcgtgttgggatactttttgccatactcctcaggtttatgttgcccacatgtgtacccactgctggagatggaaaggaaagccagtgtacacagccctccttcacacaagacatcctaactatattgccagtttagctgggcagtggtggtacatgcctttaaccccagaacttgagaggcagagccagaggtaggtgaatctctgtgagttcaaggctaccctgatctatagagctaattccaagatggccagggacacacagagaaaccatgtctcaaacaaaacaaaacaaccaaacaatgatttcatgaaccccctgatgagcaaacactctccacatgtggcaactgaagactttaacatgaacccagatctttgttctcatcaatgatttcaaaattgtgcatatgtaagtatttgcctaatattttaaatagaagaagtggaatttccccacatttaattcttgcttcactaggacaaaaaacacaagatatgaaacatcttctttgtttttaagtcagggtcttcttttgtaggcctggcctagtaccctccgtacaaaccaaactggccttgaactcatggtgaccctcctgcttctacctcccaaagtctagtatcacaagcgaaactcagttccgtgttttctattccctatctactcttaaaagggcttaattccccatacaaacttctggaattttttctcccataggggctaaggtcagagataaccgagaagcgggagaacgggtgatcttagagcagaggtgaagaaaagcagggttgatcctgtttagaaatggatagactttcggatccaggaatacactgggcaggagtcaactggggaatgagcgtgggaacaagtccttcaaagcaaagcaaagggcgtaactcctgccccaagccctggtgcaatgcctttggtcaaaggtcatgtcagttagcttctgcattatcagaaggcatgctcccatctctctcccaccgtagctactcccctgcacacacccaaatcttacttatggtgacaggacccaggctcagatatttgcctggagaagtggctgggcgtcgttttcccagctattgtttggccatgtccttcctgagctagagggaataacaatggtgatgagaactgtctacagcctggtggatcccctttttcaaaatggtgagcaacagatcccagcaggcatatatggtccctctcagtaaccaatgcttacttcctggggagcttaggtctgcattatacaaatgtaaagctagctttgaattcatatgtattgtgaagctagatttcagactcaagttgtcgtttattttccacaactgtgactatctggcatgtcaggtgctgtgtgggaaagctttgtgccaagaaagagtatgtcaggtcctagtgagtctaatacttctggttcctgtccagtaaaagccagccctacacacacccaaatcttggctcctccccatacacacccaaatcttggctcctgaccctgtgttctcatgcaaaattctccttgtgctctattttgtccttgcttcaaaatcactggcattgtctccatggcagcaaagaaggaaaattggttttgttataaaagtacagtagcttaggcaagggagcaaggaaagtccactgacggagtggatgctgaagcagtcacacagagcccactgcccaggaagtggtcactgaagtggccacacgtaaagtccactgcacagggaatggtccctcaagcatccacacgtagtctgctgcagggggaaggctggcgcagtcacacattcaaagctttcagaagcttttctcagttgataaaagtttcctcggaactatgaaaccatgaatagaatctccgataagacaaatgaggtcataatgacctcatgagagcatgtaacagctgagaacccacacagactggaggaggtggggtaagggggaaatcaggaaatgatcaatccattctcagcccttcccataagtctcccaaggagattgttacccagtaggcctattgtgttcaaagggcacaggcttcatcttcaaggttgagaaagtgtagccaaatgtttactgccttccaacttcttgtcctttttcaacttattaacaattataatttaaatcggaaagtgtgttgtcttccatgggaagaattgctcatttgtagcacctagctaccgttggttacatagtagatgctctctgataatttctaaatgagttcattcattcctttcatcatccataatgtatgtaacaaatgcatagatgcctataacttcatatctggtgactgtactctcccaccaccattttctatcatagaacattaagtgtgggcttctacacagagaagaaatgaagttagggagagttttcctaacttgtgatcttggtataactggaaggattccagttattaattggctttggttatcctcactaacaaactgccttgtgccttaaagttacatggtttccattcctgccccagttgttttctgtatagtctttgctagagggagggggaaagcaaagaagagagaagagttgtgaaaacatgagttgtgataggttccaacatttatgtactgccctaggtcctcagaaacccacaatggaccactgaacatgtcagcctctgagggaggtatggcactcagtgttgatggtctacagacttcactacagcagtcagcgttcagagctggaagctctgtaaccatggtgacatgagcctgttctctagaggcagtggtggccagatgcgaggtcgttggttgtcataaaggctgagctgctcgccatggtctctctgtggtttgtctcagattcttcgcccatagagagaggcattgaatacgtcgactctgacatttctcgtgagaatggtctttctagtaccagtgtagcaaaggaatcataaaatttgataaactgaagacagttggattagcaggtaagatcatcttaaaaagaaagtcccccttgagcctctgctgtggtcactgcctgaggccatgatctctttacctagggaagagaagaggcacctcctctgccagccatgatgaaggaagcatcggagcctctagccagtgtcaccagcatcaataagcaagacagtaaagtacaggatggagagatgtaagaacacaccaactggggcaagcggggtctggcttacagtttgggatggaatacatacctcagtgtttaaaaatgacttaggtgtgggtgtctcgcgccttggcaagtaaaagtgcttgcctgcaagccttgtgactgggatgtggtcccaaacctctgtcatggaaggagctccctccccaatagtaagtacaataaaaaccatctgggaagtcattagaactacaaattccataggtttcccaaatataatgactcacagcatcaactattttcccaacctctgttttataagacccccccctcctctaagcaacataaagaattgccctagacagaactcttccataaaaacctgggtgggatttcacagctgccctttaatggaccaaggccatcagcttaagagcttgtctagagcaggtgtggaggtgtggcagctcacacccatgtttcccgcacgctggaggctgaggaaggaagcctgggctgcaccacaagatgatctcaaaaatcaaaagctacacagaaccaccaccaatagcaaactgcgaggtgaacacgagaccattagaatttgctcagggaagtgttggtgggggcaacatgcataatagcccctgctccaccacagctgttaaccatctgtcagctgaagcactggggtgggctttctttggttggctaacagaagcattcagctctcaagggcacgtaaccagaagccgtgcgtcacctcagacttagccctgtgttcaccattcagcacccggcacctgtctgtcatgagaagctgggactgtcagtatcttcaaagccgcatgacccagccctctcaaatgctggcctgagctcctgccattgctcctggcttagcatctgttatctatagaggaaggaaaatacagagaaggagctgggcaaatgccaggactcaaggcagtaagaagattcccttctaaaagcacccacagatgggtgagcacagggcccatacacccagctgtagcctgagagccaagtcctggaaccttcactcttcccaggatgtgtgcagccatcagacacttatttttattcttttctcttcttttttttttctgagacagggtttctctgtatagtcctggctgtcctggaactcactctgtagaccaggctggcctcgaactcagaaatccacctgcctctgcctcccaagtgctgggattaaaggcgtgaagccaccactgctcagctcagacatttatttttaacagaactaaggcttcctgagtccctgggccaagtttctctgtttcagctacacagggcttagtgggaatcttttatactggacttacatgtatttggaagggatttttttttcctaaaggaaaagtttgggggtgcttacaacattagcatacggagaagaccagagtgagcgtgcagtggaaaccagatatgaggaatgccgatcacctcccaggctttgtccaggccgcagcagggagaagctctcccatgggagcctgtctgcggccgcagagatgacacatgtcagaccctgtagtctcctgcccacttctgtcatgatcatactccagagtgtggggctcctcagacaaacgagagtgcttggagcatcaccgagctcactgagcaccgagcaggggaaaacgcaagtctgaaagcctgtgccgtttcttcgcattttaaaaactctggttgtgctttctgagaggctcatttagtggcatctgctgttgattaaggagagctccagatataaacattcccggggaaggaatgcgcagagtgaaggcatgggcgtgatgattcccagcgaggacctagtgaagatggcagaagaggaagttccccatagaaaccacaccgaacaaccccagccagataccgtctttaacaaccttgtgaacggaaccgtttcccgtgggtgggtcctgcagagacttcctagaggaaggaagcttcgttttggagcacggcttcagagttgtcaaccatggttgactccattacctttaggctgaaagagcatggaggaggggtgtggcccaggagagcagaagcagggcagagatgggaagagccagaacaagatagaaagtccagagctctgtgtgatgaccccctgcctccaacctggccccagctcgcaccacaatgtgaatccatcagtggatgaccccattcggtaggacagaaccctcttacctggccacctctggaaactctccggtagacacgtacagaggtgccttccgctgagcctgctaggccactctcaggacaatccagtcacactcaggattagccatgaagtaagagctctgagaagtgaccgagagagaagtgatgtgggaaatgaagtcggttcctgatttatagtaaattctatagacccatgatttgacatagggacagctggacaggccatatgtccagttttataaagcaatgaaaggatttggaccctttggcttttattccaatttaatcatcacagatgcatgtgcatacgcccacgaacacacacacacacacacacacacacacacaagcacctgtctctctgaggctacaggaacagtgttgatgtaaagcccatcataatccattgttaatcctaagccaactccaccattttgggccacatttaaagcaagctttagtaaagattaaatgctgaccagaagatggactttggccaggaccatctcctgggatttatcgcctgagagtggcctcaagccatgtgtcacacagacagtgttgtcctggtcactgtactttcccacgaggctttgctatttcccaagaactacaattcccagcattccaggaagttacctggttcctgggaaggtggggcttacaggttaatttgggatcaaacataacactacttagcttgtgaacaattatactgtagtttggggactttgctccaatgaacatgtagggtttaataaattctttattttttttgaaaaactgtgttcctaatagaagtcacttattactgtggtacttgaaaatggccattcctccttcttttctggtttccatgagagacggggaggggaggctgttactagaaagcaattattatccacataattctgtcagtattggaaggttagttagcagctcaggaattcaaagaaaaggttataccagtgaacaagcactaaagtcttttgtacactcacggttaggaaaatacccatgtcttgatttgagtaaaagaaatcaacttaaaatctaagaaggaaatgctggaatcctggttgcaagcattatactataggtttttgctttccaaagccactgatagaatctgttgatctttaagttaaaaatgaaatatacagcaagacaagggtacaagtccactcccgtagttgggaccagagcttggagacgctgggttccctttcagatgtgtggtacatttagcagaattctgagtaacacctcgtgcctcctgcactcagatgccttgcttttcttactttgttcattatcattttgcatacagaagaaaagaaaaaattggaaccatcactccatcgaaacagcattcttcagtccacttcttcccaaagataatggattcagactccaccacgctcatcccgctgtcccgctcattttcccaagaaatgccaattggcttctaccagatcaccagcacccagaacagctccaccttatcgtccagaggacagctggcttctaaatccaccatcctgagctgctcccacaaagacagcagcctgggaaagcagagtgcgtaccaagcgtctgaaacgatcccgaggccccagggatgtttgtttctcagtatcagtatcacacatagagtaggttggccggggctctagatctgagggtttaaacccagtacacacatgtaaacgcaggtgcaaatacaacatctccatgaggaagatgactgcagctaccatgatggcttctcggtccaccattagcttgttctagcatcattggagaactgaaacttgccgtgagtccctaagaacctccacaggatgctgctagaaaggataaggtgcccagagccagcatggtggtctatggatccgttgtcacattctagaattgattaagaactaaaattgccagcgtctagtcccaaggatccctctgctgaattctgctgtgaggactaagcaagggtcttccccatctctgtggagaagatacctggagctacagtgatggctagagagttaaactgtccagtgtgtagtaggaagggccctttgtaggacgctgacacaaaggatacacagtatcttcccttgtgcctttagggagactccaggctcccatgcagaacagatatggaaagaggagatggtgctggagatgaataacatagagaaaggggagcaaccaagagaacatgaagcaggaggaactgggtggtgcacagcggtgccagtagggcacagagccacaagggtcatcacggtcaggtgatgctgtcccagccatcacagaaccagctcctccctgcccttcatagggtgacgagggatagaactcagcagcccttgttctaatgttccacccctgcagagtgaaagttaagataccagcttcgcaaggttctgctaggcttggggcctgtatgggaacccagcgcatagcaacatgttagagttaccagaaatcagcttcaacccttagcccacctgtaagctccttatagaataatccacatttgaattgtgtgcccacaagtaccgaatgccccactctctctactctgtggatatttgcagtctggctggttctcatctgttccctgtttatttctggtacatccctaggcttcaacatggtatatgtgcagtgtgtatggctcccatgatgttcacagtacgcatcattgtcggtatgatccagatgacttgtccaaagacacctgctaaatccttgatgacctttgtcactgagcaatgggaacagtgttaaatatgcaaataacagactttagatttcagaagaaatgttttcccgtctcctggaactatgtagactcctgcgtttgttctgtgtttgggtcaaactgaaagctcctgataatggggggagctaggcatagtgctgtgtcctgcacggccagagaagactggggtgtggcatttccttgagttaccacagattctcctgcagactcaggcctgtgaacactgcagtgtacatgctgtgccaattcaatgctgtctgtggctctcagtgagctaagagctcatttaatgcctccttccctttgagaacacaagcgttctttcctcgtgatgggctgcgagggaagatgccgtgcctagccttttcccaaaggaactgcccgagaggctgtggacactaatttaattccagagtttcttctcagcaaaatccttggagcaaccactatagtcatcaggaccattgataaagcttggtgatgattccagatgttcttagtgtgcgcgaggccctaggcacagccctatggtagcaaacacctatcatctatgcctttatacatttctccttttgttagagatacgagagttgtgtttatgattggatgactcttggcccagggtcccataatgcaaaatcctcatcctataatgatcaccattgtttacttggtgccagctaaataccaggcatctgatttacccctgggcctcatcatctcttacagaggtggtgttgtgtaaggtaggattttaatctgggcagtacagcagcaagtattaagtagaataagaggatatctgtaacaggtaacactcaaatttgacaggctctgtgcttaactcacgaatactgatagcttctagtgcagctctaaataatcaattaaacacccagcgtgcccgtaagagggagtaaacaaggaatctgaattccccaaggatgcctgagccaagatggccacacagtccatacaaacgccatgctacccctgagcatccaggacagcagagtctgtagaaagtgaggacagggtggaaaatgttccctgacagcagctttacagatgtccaccagcgcctccgctctcgctgagtttggcaggatggaaagcaaataaggaatgttctccgttccctttggcgacgactgaaacgcctgtctttgcttgcttgtccgctttctttaaaaggcaccagctccatggttccacggaggcagccccagtcgagctctgacgtggatacgtatacttttgggaatggtgaggattatttcctttctttgtttggagaatcgaagaagctcaccgcccacacaccccaagccgagaacgtgagcgaacacctttctgtgatccttgaggaagtcggccaatttacatccaggtacacatttgagaaacttacagtcttcctttgaggtcgtaggtcggtgcagagcagagctctgaactgttatcagatacatttattttaccaccaatcccccccccccccgccgccagaaaagtccctgaactataactacccgtgctctgagaaattagaggcaactgatagaagtttccagaggagcaaacatgggatgtgaatttttcaaagatgccagagaaaactacacagcacagtccacgtagattgcccgcacaaacactcacttgctggcctttcactgctagctaatcattcagacggctttaatctttttcttctgttagcctgtggagttaaagacaagagcaaaatgaatttttacaccaatgatctattttaatggccatcagtttctctggaaaggattgatcaagaaacgttgttattaggcctaaaggcttgctcaggctgtttttctagccctgcagtgccgagtctctgaagaagactgagctctgacaagctgatagcgcgctgtgggtacacaggcatgtctgagggctgagggggcaggtaaggagagtgcagtgtccaagtcactcaggcccgatgtgccagttagctgataatggagaaaatccaagtgttctgccacccggacacacactgtcacagtcattcaggatctgccatcgtaaaagtggtgattaaggcaaaggcgtacaagacttttaaatacttctaaatacaactctgtgtgtgtgcctctgcgtgtatgtctgtgtgtgtctgcatgtgtctctgagtgtgtgtgtctatgtgtgtatacctgtgtgtgtgtgtgtctgtttgtgtgagtctctgtgtgtgtgtctgtgtgtgtgcatgagttgtctttgtgtatatgtatgtatatgcgtgtctgtttgcgtgtgtgtctctgtgtctgtgtgcatgtttctgtgtgtgtgtctgtgtctgtgtgagtctgtgtgtgtgcatgagtgtctttgtgtatatgtgtttatatttgtgtctctgtgtctctgtgtctgtaaatgtgtgtgtgtttccatgtatctgtgtatgtctgtgtatctgtctgtgtgcatgtgtgtgtgtgtgtgtgtgtgtgtgtgtgtgtttaggtacactctcacctgtgtatgttgaggtttgggtgtgttccttggcagcaatccaccttgttttttaagacagggtttctcattggcttggagctcccaagtaagataggggatcagttggtgaagcccagggatccgtgctctccacctccccaccagtgcgtgtccccgcagcagtgcgtgtccccacagcagtgcgtgtccccgcagcagtgcgtgtccccgcagcagtgcatgtccccgcagcagtgcatgtccccacagcagtgcatgtcccctcaacagtgcatgtccccgcaacagtgcatgtccccaccaatgcgtgtcactgcaacagtgcatgtccccgcagcagtgcatgtccccgcagcagtgcatgtccccgcagcagtgcatgtccccacaacaggcctttttacataggttccaggaacttctcgggtcttcatgcgtgcatggtaaactttaccaacaaccatcgccnnnnnnnnnnnnnnnnnnnnaagcccagggatccgtgctctccacctccccaccagtgcgtgtccccgcagcagtgcgtgtccccacagcagtgcgtgtccccgcagcagtgcgtgtccccgcagcagtgcatgtccccgcagcagtgcatgtccccgcaacagtgcatgtccccacagcagtgcatgtcccctcaacagtgcatgtccccgcaacagtgcatgtccccaccaatgcgtgtcactgcaacagtgcatgtccccgcaacagtgcatgtccccaccaatgcgtgtccccgcagcagtgcatgtccccgcagcagtgcatgtccccgcagcagtgcatgtccccgcagcagtgcatgtccccacaacaggcctttttacataggttccaggaacttctcgggtcttcatgcgtgcatggtaaactttaccaacaaccatcgccagtatcacttctgagtatgactttaagaacttccaggtcagagaagccctgtgggctgtgtcttagagacagagtatccagacagtgaggcagagcttgcctctagcctggatgatcttggaaggcaccgtgaaggagctaccatttagacaggcttcgaaagataaatgtatttaagatgtgcaagtttggagtctgtgagaacactttagaaccccagttctcagtgtccaggtgggatcacctggtggggagggggccgcatgctttcagtgtcctgactacctcagataatgtcagggtctctgggagaaagtgggacagccattgttattgttaatcccagggtgattctaaagcagacagggtctctctttgtcctgcagctatgaatgctgggctggttagccagtgagccccagaggtctatctgtctttgcctccagagttggtgcctggcttttttatgtaggttctggggttgggactcagatccttaagtgtggcagcatctccctttaccatctgggctgtctccccagcctaagcattgccttggtgaggtttggtgaggtaggatgtaccttgatgtaacttcagattttttatacttactgacactgagcctggtttggtattttaaaatatgaaaaattgaccattatgtctccagtccccctttcaacacatatattcagctgcttgaaattgtgccactcttctctaatgtgttattttatttatttaaaccaaatatttcccactcctggcctaagacttttctgaggactgaaggcagttctccaggggttagagtgcagtgctccaggggctagagtgcagtgctccaggggctagagtgcagtgctccaggggctagagtgcagtgctccaggggctagagtgcagtgctccaggggttagagtgcagtgctccaggagttagaatctggtgctctagaggttaccatgcaatgttccaggggttagcaggcatgtggtgctccaggggttagaatgtagtgctctaggagtaagcatgtggtgctccaggggttaacatgcaatgttccaggggttagcatgcaatgttccaggggttagcatgcagtgctcctagggttagcatgtggtgctccaagggttagcagcatctggtgctccagcaattagcatgcagtgttccaagagttagcatgcatgtggtacttcaggggctagcatacagtgttccagaagttagtagggtctcatcctgactggtgagaacagacccttggcagacacttccctgccaatgctttcagtgtctttccctctagccttggggaatcttgttcacctatgagctgaacaaattgagtccacagaagactgcagacccctggagcttctctgtatgagaattctctcctgtctgctgctttccacccgtgacctccagcctcctaggcctccttatatcctaaccctgtcagagaacccactggctctgcgtggttccctctctggggaagttgacaagctcagtgcattggtttcctgtctgttgggcatcacctcttgtcatagaccaatgacccgatatcttcagaaacatttgtattcatgacagttctcaagctggaaaaaaaaagatgtatccccaattcagtcagagccatatgctaactaacacacaggagagaaggaagaaagggctgtgtatgctcagaagtgagtctgtatgaaacagatgctcacgggccggtgggggtataaggagaggcacctgctcaggagagaggacacataactgcgtacccgtgctgcctcttccgggagatgggactagagggaccagctgggactggggacactcagcatttaccagtttgaaattagcgggtaaggcactgagcagcgagagattttgggaggtgccaagggaggacactgacaaacaacctcaggtttccagcgagatgatgaaagggtgcgtcctgttatgtagtaacacggtgaagccagcctagcgtctagctacttcagactgattcagactcacgtgggtttgtctgtgttagaactcagacgcctgccagaagcgaagaatatgttctcttttgacaaaacactatgcagagccttaaatgatctctctgcagagtttaaatatgtgatacctaaaactaaatcaaagcagcatgcgcaggaaacaagggtcaaacaggaatggattccagaagcagacataggagatgggatggtggaggtatctaaggattccagcaagcagcgactaagctgttcagagaattgggacaagataaaaatgttagcctagttctgtatacggaaggcaaagcaaccaaaagcaatgctacaatacgatatgacacaatacaataccttaccataccttaccatgccataccaacctatacaataccatacccaacaccagagactgccatgcggttcacagtatattggatacagtaggagaggcgattgttgatgaaaatatccagtctgaattttagagagtaaggaggttagaaaaacagaacatacaaggctgagaagaaatggaagccaggcaagatggctcaggagtgagaggtgctctccaccaagggtgaagccgtgagtttgatccctgggctgcctgtgaaggaaggggaaccaattcctgtaacctagtctctgacttccacacacacagcagctgctgctgcatacatgcacgtgtgtgcattcacacacacacacacacacacacatacacacacacacactcaaaaatgcaaatatcagtttaaaaaacttaaaaatccacttgtatcatagttactgaggaataagagtgattaaggcaaaatgtgtggatggaatgtttcaccaaaagcagagaattttctcccaaactactaaagataacaagctgaagaccagatgaatattaccaactcacagtgcacgaaagaaaccatccatccaaccaaccaacctaggtatattgaaaagacttctaaaagagaatgctttaaaatttagaaatctccaaagacactgcagaaacactgccttgcagctagcttgcttttacacaattagaagacagaggcatggaagtaagtctccaaagagaacagcaggaaaaatcctgcaggccaaacaagcagtgtcctgacactgcctaacttatagtcttacggcttacaatcgtaaacttgtgtggattagttttattttgctggcataaccagctgtcaccaacttcatggcttaaaataagcaaaacagcacctactttttgaaaacagtttactatacattttgtgttaggggtggggggagggggaatgactaaagaacagcctgtggaattccattccccccaccaccatcaccaccaccatcatnnnnnnnnnnnnnnnnnnnnccaccaccacatggattccaaagatcaaatccagattatcaggcttggcagcaagtgcctttacctgctgagccatcttgacagcccttaccacagttctgtagggttggtttgcctgagttttccaagcatctgagctctacgctgaggctctgggcaagaacctggtatcaagctcttccaggtttttggcaatgcggctcctctggcttccaggcggagaagtccatgttctgtctgagtgccatcacggcatcgcctcctcagtgtttgtgtgtgggccccgcccggtacctgcctccagcagccttgctcatcccttctgttcaactggagccaatccccggattccaaggattcgctggattagaggcctattgaataacctaggacagtctctcttgcttcaaacctgcagctttaattgaagctgcaagaccttttctagttttcttagcatattcacaggtccagggatgaagggtaggtccctttaggctcccacagtggtctaagcacagctaatgcaacgctgaagaaagaaaatgagggaggttttttttttaattaaatactatataaggcagtggagaaactgctatgatgctgtgacaatgtcacacagatgagagcctgaggacagcagccacgcagacagacagaaggacataggtgttgtcatgggatgtcaccaggtagaaagggaaagggcactttgcctgttttaggcagctatacaagtcagttcccaccggtcagatgaattcagaggcaccactgaggacctgtgaggagttggtcctatagggatggaagccatgtaaaagttgctctgcggccacctgcagtcccagtgcttagaaggtgaagactggagacctcccgggcaaggctggccagactagagcagcaagttctgcgttcagcaggagcaaccacctcaggcaagaggaaaaagttgccaacgtgaacctcaggtctctcatgcacactcacaagcacaaggaaatgcatgtgcctcccacacgaatggatgtgcaaactcacacacacacaccatatacaaatatgtatacaaagaaatcttggttttccataccatttttaaatttagcattatagataagaaattgtggggaaatgacagagcaatgtaaccgtgttcttgtcaagtgcttggtaagtaagacttatgaactactgtgaccagccaagacacagtgatgtgtaagacttgtgaaccattgtgagcaaccaagaaacattgatgctgttcatagctcaccacagtcatatcacgaccttcagctgtgttgccagtgacactgaaacctgcagattcgaaattgacgtaggccctgcaacatactacattctcaataaaagaggcaaaatttttaaaagacctatagtatgtgtgaataatgtcacattcagaattatttttaactcacagtgacttcatcctcatggtcactttatcagaaaagaactatgtgctttagcttttgatgaccatactttaagacttaaatgttatgtttctgggtatgtgcctgcacatgggactgtgtcccgtgtgcatgtggtgctcctggaggccaggagagggcgccagagcacctggaactgagttattggaggttgtgcacatcatgtgggttctggacagcaaacccatcccctctgcaagagcagcaagtgcgcttagccaacaagccatcactccagccctttggtgtctttttgggtgcttgatgtcatgtcttctgttgagagcagaaaattgagaaaaatcatagccacgttttccatgatcagaaccaataggccaagctatttttctcaggttgcaaaatacacaagttgtggaggccgtggagaaggctcggtgggtaagagcactggctgctcgtttggaggtgcaggctcagccccccgcacctacatggcagctcactcctgactgatattctggtttctggttacccagtgttcactctgacctctgtaagtactatatgcacagtgtacagacagacatgcaggcaagacacctgtacacataaaataggacccaatcattaaaacgtcctcaaggcctctatagactcttgcctaagagagtccatagctctgccgttcattactcaggctctgtgggtgggtgggttggttcgtctctcaagaaatctcagctggctaggaacatgctgcatagactcaactgaccttgagtttgtggctctcctgcctctgttctgagtgccaagattccaaacatgcacttcgttatggggttcttactgtgggccagagacattcctattcatacccaccctgtcttcgtttcttattttctagttctctcggagagattaaaatagctgaggtaaatatcaagggcctctttgtgaggcttgtcaactcctccaatgaaaaggaagtagagattggaaaccacattctccaacaaaacgtgaatggacgcgcagtctccttgtaccagttccccgacaacatcacactgcaggccaactccacggtgacagtaagtatctgaaaccaccagctgggtggactgtgcacgggaaacactgcgagctgggaacacagtgggcaaggacacaatgatgtgtgactagtgtgagttaggggtattgtaatgacatacagtgacctggggatgctgtgagctgtaagtaatatagactgggaatactggggggctggaataccagggatctagaataccaggggctggaaataccaggggctgagaacatcttgaccatgtgttgaagatacactgaattggaaataccctgatgtaggaataccagtgagaagagctgagaatgaattgagtcaggaatctcatgatctgggaaaactgtgagctaggaataccagggtctgagtgatgaatactgtgagctaaaaatacagtaagttgggtacacatgaactgggaacaccaagatttgaccatgatttgagaacatggtgaattgggaatcctgtgagctgcggatgtggttggctagtgataccatgggctagaaatacaatgaggtaagaatatagcaagctgagaaccccaggagctgagagtgctatgagctggtcaaatacagcaagctgcaaataccatgagatggcaccaacagaagctaagatcatcgtgaagcgggaatggccggagccagtgctatggtgggttggaatagcctgagctgacagtatggtgagttagggatactgtgctttcgagatatcatgagctgggactcccaggagctggaaatgtggtggattggaagtaccatgatctgggattggtgtgagttggggaacaaataatctgtgactgcaacatgagtagagaacactgagagctggaatttattaatgcattgggaacactatcagccaggagtgtcaggagctagggaaactttaagccaggaccacagggctgccttgaacagaaaaacatcacaagcagggaataccgtgagggaacatggtgagctgggggtagcaggagctgggagcactgggagctgggagcactgagagctgggagcactgggagccagaaacactgggagccgggaacattgggagcagggaacgctgggaactgggaacagtgagctgggaacactgagagctgggagcactaagagctgggagcactgggagctggaagcactgagagctgggatcacggggagctgggagcactgggagctgggaacactgggagctggggacactgagagaggagcactatgtgctgggagcacagcatgagagcattgtgaactgggagcactgagagctgggaacactgggagctgggaacactgggagccagtaataatgtcagagctgggttcctatagggaatgctgcctctactgtcagcctgtggcttggcacaagtggcctcgtggatacttgatctttgtactaaatgtgattttgtggtttgtagtgtcgtggatggatgcctgtactttgctctccacagctttcttccgtgtagtaagcaatcatattctggcttgtccttcaaagtgaaaatcctaagtctgaaaatggattcttaaaagagaagtaaagagctggtcatctcagagagcaggcactaagggggttctccctgacaccccccatctgtgaccctctgaaccttgatgtctggtctgtagccatgtgctgcaagagtatgtgtgtgcttgttttacatgacactgagataagatctctacaaaactactttagaaaaccacaaaatcaagctacaaaaacaagcaaagcaaaacaaaaaacctcaaaggtacgacctagtgttttgaataagcctacagtgtgcatttatatctatcctggatccgcttgcggaccacaggccagggctgggtggttgtttaaaccgtgttcggtcactgtttagcattacattatattttaaaacaacctagaagctcagatgcctatatagtcccaggtcctcaggaggctaaggctgaggcacagaaatgatgtgaacgtaggagttctagccaagaccaggcaaatgcagggagagccttcccgcctttaatgataacgaaaaccctatctgttcagaaagattaataacaatagcaccgtcggatgtggctctgggtggaaccgcggtagcaacaaactgctttctctaaggtgtgggcagcagcttcggaagcaaagccacagccaccaacggactttgtttgggagggacagagcaagttccgatccagtccagactgcacaaccatcttgtgcaagcccaatggtgaggtgagtgtcagagttttcaacactcgatgctggagtagccggccactgttcccttccgcccttggtcctgctcacattctgcacagcacatctagagtcacccccaaatgcccccagctagtgcctcaggcagaccaacacccctctctcccagtgtgtgcccagcagcagtcatggtgtcccgagtttccgatcaacagctgtctcctatccctccccagtgtgccccctgctggccatctggagttatggcaccctgagcttccgaaggctgcagcagattcagagtcaggggtgggctttatttgcgatcctgactggaagtgtgagataaggaaggtactgcacatggccttctctgctcagctattcatcccaacaatgtttcttgggagtcttgcctttgcctatgctctaggctgaactatgcacaaggaacacaacacaaagacttgatctctgcgcccaggggggtgcacaagctaatggaagggcttatactcttaatttgaaataactatcttctatgcggaataaaatgagatactttagaaataattttctgggattctttccccatgcttggcagtctcatgctttcgttggtataaaactagcataattataatttattctttaattcttatccctagacaaatttgctacgccacaaaaccattaacacccccccccataatatgtggactagagtatgaatttctttcttacttcattatacaatgatattcggtaactacctgttgaacaggctagagtaaaattttaaaagattttattttctgtatatgttgtagggtgtgtgtatgtattatgtggcatatgtgtgtgagtgttcacagcatggggttgtgtgtgtgcagtgtatgtgtgtgtgtatgtgtctgagtgtgtagagaatgtgtgtatgtgtgcagtgtggggcatatgtgtgcctcctgtgtgtgcatgagaaagaatatatgtgcgtgcatatgagagagtgtgtgtgtgcagtgtggggtgtatgtatgtgtgtgaatgtatgcagtagtatgtgtgagagcatgtgtgtgtgaggatgcatgcagtgtagtgtgtgtgtgtatgaatgtttatagcatagcatgtgtgtgagcgtgtgtgtgtgtgtgtgtgtgtgtgtgtgtgtgtgtgtgtcctcagagtaaagaagggagttcagattctcaagagttggaattgcaggctgttgtgagccactcacgtgggtgctgggaaccgaagctgagtcgtctggaagagcagcatccttacctgtttaatcgtctctcctgccctttgctgggtttcagattgggaactctctagattcatctttactcagccatccatgtcttcgtgatttaaactgaattttataatacttgtatttaaaattggctagaaaaataaggacatgtaattcaaatgaattaccctgtctcctgagacaccatcagcaaaacccaggttaagatggagggctggaatgtgaaatgtcagaccaccttccctgcctgcggagggcacctctgaaggagataggaaactgtaggtggttccttccttttgtgccttctccaccttggcctgatcacagttatggaggagcttggccaaatctcctgtcaccgtgagccactctgccattgtttgcccaccatcatggcatgaaatctcatgaaattatgaaccaaaatcaatgcctgctcagtagtattcatgtccatcatttgactgtcccttcacacctcacaccctgcaggccagtcttggtcccacagaggctctcttcctcccttgacgcagtgcattgtttggcacttgtcctgggtggttctagagtcatttggtaagtggggacttcagtagagaaaatgtggccatcagattggcaagtctgtggagtcactgccttgataatgattggtgtgggagagtccagccccctgtgggtgtgctgatgctggtcatgtaagcttgggttaaataagagagcaggccgacaagagccagagggagcgagtcagtaggcggggtccctcagcctctacttcggttcctgcctccaagcttatgctgctggttcctgtcctgacttccgtctgtccatgatggactgtgatcagagcctgtaagcaaataaacccgtcctccccaagacgtttttggttacggtgtttatcacagcaacagagagacctaaaacagcagcaaccatggccaaaaccacggacagggaaacctaaggtaggagaggcttacttaggctgcagtttcaggggatcaaacccaaaggttgcttgtcccctcacacttggaggaaaatattggtagcagaagcttgcagcactttccggaaaaggcttgagataaggcagcccacagactggctggcactggtgagcacagctaggaagcactaggtattctcaacaactcacagataacaccatcaaatgagtaccagtgttcaatgcacacagcgatgacgacgacgacaacagcgccacaccgactacagtagatgacctcctcttcaggccacacccttgggtttcatcccattggaaaaacccagctgtgacaaggcagtaagcttcttcagctagaaaatgcgcccttaataagaaggccagggagagcccgtgtccacctgagaccctaataaaaactcacagttctttacagacaagatcacctccattcttacctcagtgaagctagtcctcacctgcaattgcaagaaaggctttcctggaaaccctgattcctgcccgtttgctgcataaagcagacaggttttgccaggacccaggggccgctctccagctatgccacggaccagccgatgacaacctgcatcttgtggggaagtctcagccattcccccctctgcctggcacagccccacagaccaacaaaggtgtctctctggtcctcagtaacacttgctttgtgatagagcaccggcagatgacattatggattctcttcaaagacaaactaaagtgtgacttaggccacacttggaaccaccttgtcctaaatgactatagccaaaggccactaaaaccacagaagccatagagtgtgacgagggggatttgagtttcttctgcctgcagatttgtaggtagccattattctgactgctccctgaaaatctgactctctactctcctcactaatgcgctgtgagtctgggttttcaaaacagtgctgtcagtcagtcacgctggagtcacagcgtttgtggacgctgctcatcctccctcggtgtctgggacttcgtcaggcccttgttttacatttaagatccagatatggcacagatttctcctgcacagtggtagctcatggaagggctggttaaagaaatcacaacagatttaacatgtgatcagggagtccctctctacattggtgtatacccaaagaagacctataacgtaactaagtctagagagctaatggacaatggactaaaatcacttaaatggcattgcgtctggggttttcaaaagtgaatttcacttgtgcttgtcagagatatgtgacatacataaaactataatatattatagttttatatataaatatatattaattctgtaattagtgttgaaatagcccgggcagcatagcaagtttcagaccagcctgggctgcagagtgagagcctacctcaaacaaacacatgagaccaaaaccaaataatattgcaataggctatagccacacatacatacatctccgtagtatctgaaattgagaactctctccattcctattaggccattgcctggtacactcctatccactggaagcaagcctgggagaagttagagactgacattgaattcgaaagatgctcagtggtggtcccatcaatgagaaaccacatgtttggatggataacagcatctgtctcttccacaaacgaggagaaagaagaaccgatacagaaaacgccctcccaagtctaccctgtcctctacaggtaaagcatggtttgctttgcttatgaattgagtattcttcccaaccataactgactgtgggagaaaaggactggggggagggggcagatggactgtccatcagtcagttagccacagctannnnnnnnnnnnnnnnnnnnggggcagatggactgtccatcagtcagttagccacagctaattagccatttctctttaagtaaatgcttgggacgcaatgaatgctctgcctccaaggtctagaaataatttgtttatttacatgttatttttttcttttttattagatattttcttcatttgcatttcaaatgctatgccaagaatcccctataccctcccctcaccctgctccccaactccccccacacacacactcctgcttcctggccctgggactcccctgtactggggcatatgatttttgcaagaccaagggcctctccttccatcctctactacatatgcaaccagagacacagttctgagggttactggttagttcatattgttgatcctcctatagggttgcagaccccttcagctccttgggtactttctctagctccttcattgggggccctgtgctccatccaatagctgactgtgagcatccacttctgtatttgccaggcactggcatagcctcacaagagacaactatatcagggtcctgtcagcaaaatcttgctggcatatgcagtagtgtctgtgtttggtggctgattatgggatggatccccaggtggggcagtctctggatggttctttcatctatctcagctctgaactttcttgcgcgcgctcgactggccaggaagaacgacgctgcaacaggatccttctgcacacgtttattgggagagcttgattgtagaggcgaaaagacctcgagcccagaactggtgctgcttttataggcctaggacaggcgttctctctcatctgattggttaacttgtctctcatctgattggttaacttgtctctcatctgattggttaacttgtctctcatctgattggttaacttttgtcaattctcaaaacctcaccttggcaaaagaacctttactggctatgtatgtgtggtggccagctgtagccaactgccactctgcaactgccactctataactgccactctgtaactgccactctgtaaatgccactcttcaacggcttcccacagaactggcttttccttactttctcctctataattttcagtgtctctggttttatgtggagttccttgatctacttagacttgagctttgtacaaggagataagaatggatcaattcacattcttctacatgataaccaccaattgagccagcatcatttgttgaaaatgctgtctttcttccactggatggtttttgctcccttgtcaaagatcaagtgaccataggtgtgtggcttcatttctgggtattcaagtctattccatcgatctacatgtctgtcactgtaccagtatcatgcagtttttatcacaattgctctgtagtatagcttgaggtcaggcatggtgattccaccagaggttcttttattcttgagaagagtttttgctatcctaggtttttttgttattctggatgaatttgaaaatttccctttctaactcagtgaagaattgagttggaattttaatgggaattgattgcattgaatctgtagattgctttcgtcaagatagccatttttactatattaatcctgccaatccatgagcatgggagatctttccatcctctgagatcttcttcgattttttttctttagggacttgaagttcttatcatacagatctttcacttccttagagtcacaccaaggcattttatattatttgtgactattgtgaagggtgttgtttccctaatttctttctcagatgtttatcctttgtgtagagaaagctcactgatttgagttaattttatatccagctacttcattgaagctgtttatcagatttaggagttccctggtggaatttttagggtcacttatatatactatcatatcatctgcaaatagtgatattttgacttcttccttccaatttgtatccccttgatctccttttgttgtttaattgctctggctaggacttcaagtacaatgttgaataagtagggagagagtgggcagccttgtctagtccctgattttagtgggattgcttcaagtttcactccatttagtttgatgttggctagtggtttgctgtagattgcttttattatgtttaggtatgggccttgaattcctgatatttctaagacttttatcatgaatggatgttggattctgccaaatgctttctcagcatctaatgcaatgatcatgtggtttttgtctttgggtttgtttatatagtggattacattgatggatttccatatattaaaccatccctgcatccccggtatgaagcctacttgatcatgatgaatgattgttttgatgtgttcttggattccattagcaagaattttattgagtatttctgcattgatattcaaaagggaaattggtctgaagatctctttctttgttgggtctttctgtggtttaggtatcagagtaattgtggcttcatagaatgaattgggtagagtaccttctgtttctattttgtggaatagtttgaggagaattggaattaggtcttctttgaaggtctgatagaactctgcactaaacccatctggtcctaggctttttggggttgggagactattaatgactgcttctatttttttaggggatgtgagactgtttagatcattaatctgattgtcatttaactttggtacctggtatctgtctagaaatttgtccatttcatccaggttttccagttttgttgagtatagacttttgtagtaagatctgatgatgttttagattttctggtgttctgttgttatgtctcccttttcatttctgattttgttaattaggatactgtccccgtaccctctactgagtctggctaagggtttatctatcttgttgattttctcaaagaaccagctcctggttcggttgattctttgaatagttcttttttgtttccacttggttgatttcagccctgagtttgattatttcctgccatctactcctcttagttgtatttgcttcctttttttctagagcttttaggtgtgttgtcaagctgctagtgtgtgctctctctagtttcctttttggaggcactcagggctatgagttttcctcttagtactgccttcattgtgtcccagcgtgactctaactaaggaagtgaaagatctgtatgataagaacttcaagtctctgaagaaagaaattaaagaagatctcagaagatggaaagatctcccatgctcatggattggcaggatcaatatagtaaaaatggctatcttgccaaaagcaatctacagattcaatgcaatccccatcaaaattccaactcaattcttcaacgaattaaacctaggatagcaaaatctctgctcaaggataaaaaaaaacctccggtggaatcaccatgcctgacctaaagctgtactacagagcaattgtgattaaaaactgcatggtactggtatagtgacagacaagtagaccaatggaatagaattgaagacccagaaatgaagccacacacctatggtcacttgatctttgacaagggagcaaaaaccatccagtggaaaaaagacagcattttcaacaaatggtgctggcacaactggcgttatcatgtagaagaatgcgaattcatccattcctatctccttgtactaaggtcaaatctaagtgggttaaggaactccacataaaaccagagacactgaaaattatagaggagaaagtaaggaaaagcctcgaagatatgggtacaaggggaaaattcctgaatagaacagcaatggcttgtgctgtaagatcgagaattgacaaatggggcctcataaaattgcaaagcttctgcaaggcaaaagacaccgtcaataagacaaaaaagccaccaacagattgggaaaggatctttacctatcctaaatcagataggggactaatatccaattatatataaagaactcaagaagatggactcaagaaaaacttctaataaccctattagaagtggggtacagatctaaacaaagaattctcacctgaggaataccgaatggctgagaaacacctgaaaacatgttcaacatccttaatcatcagggaaatgcaaatcaaaacaacccttgagattccacctcacaccagtcagaatggctaagatcaaaattcaggtgacagcagatgctggcgaggatgtggagaaagaggaacactcctccatttttggtgggattgcaagcttgtacaacccctctggaaatcagtctggcggttcctcagaaaattggacatagtactatcagaagatccagtaataccactccttggcatatatccagaagatgttccaacttgtaataagcatacatgctccacaatgttaatagcagccttatttataatagtcagaagctgggaagaacccagatgtccctcaacagaggaatggatacagaaaatgtggtacatttacacaatggagtactactcagctattaaaaagaatgaatttatgaaattcctagccaaatggatggacctggagggcatcatcctaagtgaggtaacccaatcacaaaagaagtcacacaatatgtactcactgataagtggatattagcccagaaacttagaatacccaagatataagatacaatttgcaaaacacatgtaactgaagaaggaagaccatcgagtggatacttagttccttcttagaattgggaacaaaacacccattgaaggagttacagagacaaagtttggagctgagacaaaagaatgaaccatctagagactgccatatccggggatccatcccataatcagcttccaaacgctgacaccattgcatacactagcaagattttgctgaaaggacccagatatagctagctgactcttttgagactatgccagggcctagcaaacacagaagtggatgctcacagtcagctattggannnnnnnnnnnnnnnnnnnnnnnnnnnnnnnnnnnnnnnnnnnnnnnnnnnnnnnnnnnnnnnnnnnnnnnnnnnnnnnnnnnnnnnnnnnnnnnnnnnnnnnnnnnnnnnnnnnnnnnnnnnnnnnnnnnnnnnnnnnnnnnnnnnnnnnnnnnnnnnnnnnnnnnnnnnnnnnnnnnnnnnnnnnnnnnnnnnnnnnnnnnnnnnnnnnnnnnnnnnnnnnnnnnnnnnnnnnnnnnnnnnnnnnnnnnnnnnnnnnnnnnnnnnnnnnnnnnnnnnnnnnnnnnnnnnnnnnnnnnnnnnnnnnnnnnnnnnnnnnnnnnnnnnnnnnnnnnnnnnnnnnnnnnnnnnnnnnnnnnnnnnnnnnnnnnnnnnnnnnnnnnnnnnnnnnnnnnnnnnnnnnnnnnnnnnnnnnnnnnnnnnnnnnnnnnnnnnnnnnnnnnnnnnnnnnnnnnnnnnnnnnnnnnnnnnnnnnnnnnnnnnnnnnnnnnnnnnnnnnnnnnnnnnnnnnnnnnnnnnnnnnnnnnnnnnnnnnnnnttttattggggagttgagcccattgatattaagagatattaaggaaaggtaattgttgcttcctgttatttttgttgttaaagttggcgttttgttcttgtggctgtcttgttttaggtttgttgagggattactttcttgctttgtctagggtgtgatttccgtccttgtattggtttttttctgttattatcttttaaagggctggattcctggaaagataatgtgtgaatttggaatactttggtttctccatctatggtaattgagagtttggctgggtatagtagcctgggctggaatttgtgttctcttagtgtctgtataacatctgtccaggcttttctggctttcatagtctctggtgaaaaatctggtgtaattctaataggcctgcctttatatgttacttgacctttttcccttactgcttttagtattctatctttatttagtgcatttgttgttctgattattatgtgtcaggaggaatttcttttctggtccagtctatttggagttctgtatgcttcttgtacattcatgggcatctctttctttagatttgggaagttttcttctataattttgttgaagatatttgccagtcctttgagttgaaaatcttcattctcatctactcctattatccgtaggtttggtcttctcattgtgtcctggatttcctggatgttttgagttaggatctttttgtattttccattttctttaattgttgtgccgatgttctctatggaatcttctgcacctgagattcactcttccatctcttgtattctgttgctgatgctcacatctatggttccagatttctttcctagggtttctatctccagcattgcctcactttgggttttctttattgtgtctacttccctttttaggtcttggatggttttattcaattccatcacctgtttggttgtgttttcctgcaattctttaagggatttttgtgcttcctctttaatgtcttctacttgtttagcagtgttctcctgtatttctttaagtgagttgttaaggttcttcttgatgtcctctaccatcatcatgagatatgcttttaaatccgggtctagcttttcgggtgtgttggggtgctctggactgggcggagtgggagtgctgggttgtgatgatggtgagtggtcttggtttctgttagtaagattcttacgtttaccttttgccatctggtaatctctggagttagttgttatagttgtctctgtttagagattgttcctctggtgattctgttaccctctatcagcagacctgcagactagctctctcctctgagtttcagtggtcagtgcactctcgcaggcaagctctcctcttacagggaaggtgcacagatatctggcgtttggacctcccttctggccgaagatgaaggcccaaaacaggacctttcccagaagctgtgttgctttggcctgtcacagaagctgttagcttctgtgtgcacactctcaactgtgcagannnnnnnnnnnnnnnnnnnnnnnnnnnnnnnnnnnnnnnnnnnnnnnnnnnnnnnnnnnnnnnnnnnnnnnnnnnnnnnnnnnnnnnnnnnnnnnnnnnnnnnnnnnnnnnnnnnnnnnnnnnnnnnnnnnnnnnnnnnnnnnnnnnnnnnnnnnnnnnnnnnnnnnnnnnnnnnnnnnnnnnnnnnnnnnnnnnnnnnnnnnnnnnnnnnnnnnnnnnnnnnnnnnnnnnnnnnnnnnnnnnnnnnnnnnnnnnnnnnnnnnnnnnnnnnnnnnnnnnnnnnnnnnnnnnnnnnnnnnnnnnnnnnnnnnnnnnnnnnnnnnnnnnnnnnnnnnnnnnnnnnnnnnnnnnnnnnnnnnnnnnnnnnnnnnnnnnnnnnnnnnnnnnnnnnnnnnnnnnnnnnnnnnnnnnnnnnnnnnnnnnnnnnnnnnnnnnnnnnnnnnnnnnnnnnnnnnnnnnnnnnnnnnnnnnnnnnnnnnnnnnnnnnnnnnnnnnnnnnnnnnnnnnnnnnnnnnnnnnnnnnnnnnnnnnnnnnnnnnnnnnnnnnnnnnnnnnnnnnnnnnnnnnnnnnnnnnnnnnnnnnnnnnnnnnnnnnnnnnnnnnnnnnnnnnnnnnnnnnnnnnnnnnnnnnnnnnnnnnnnnnnnnnnnnnnnnnnnnnnnnnnnnnnnnnnnnnnnnnnnnnnnnnnnnnnnnnnnnnnnnnnnnnnnnnnnnnnnnnnnnnnnnnnnnnnnnnnnnnnnnnnnnnnnnnnnnnnnnnnnnnnnnnnnnnnnnnnnnnnnnnnnnnnnnnnnnnnnnnnnnnnnnnnnnnnnnnnnnnnnnnnnnnnnnnnnnnnnnnnnnnnnnnnnnnnnnnnnnnnnnnnnnnnnnnnnnnnnnnnnnnnnnnnnnnnnnnnnnnnnnnnnnnnnnnnnnnnnnnnnnnnnnnnnnnnnnnnnnnnnnnnnnnnnnnnnnnnnnnnnnnnnnnnnnnnnnnnnnnnnnnnnnnnnnnnnnnnnnnnnnnnnnnnnnnnnnnnnnnnnnnnnnnnnnnnnnnnnnnnnnnnnnnnnnnnnnnnnnnnnnnnnnnnnnnnnnnnnnnnnnnnnnnnnnnnnnnnnnnnnnnnnnnnnnnnnnnnnnnnnnnnnnnnnnnnnnnnnnnnnnnnnnnnnnnnnnnnnnnnnnnnnnnnnnnnnnnnnnnnnnnnnnnnnnnnnnnnnnnnnnnnnnnnnnnnnnnnnnnnnnnnnnnnnnnnnnnnnnnnnnnnnnnnnnnnnnnnnnnnnnnnnnnnnnnnnnnnnnnnnnnnnnnnnnnnnnnnnnnnnnnnnnnnnnnnnnnnnnnnnnnnnnnnnnnnnnnnnnnnnnnnnnnnnnnnnnnnnnnnnnnnnnnnnnnnnnnnnnnnnnnnnnnnnnnnnnnnnnnnnnnnnnnnnnnnnnnnnnnnnnnnnnnnnnnnnnnnnnnnnnnnnnnnnnnnnnnnnnnnnnnnnnnnnnnnnnnnnnnnnnnnnnnnnnnnnnnnnnnnnnnnnnnnnnnnnnnnnnnnnnnnnnnnnnnnnnnnnnnnnnnnnnnnnnnnnnnnnnnnnnnnnnnnnnnnnnnnnnnnnnnnnnnnnnnnnnnnnnnnnnnnnnnnnnnnnnnnnnnnnnnnnnnnnnnnnnnnnnnnnnnnnnnnnnnnnnnnnnnnnnnnnnnnnnnnnnnnnnnnnnnnnnnnnnnnnnnnnnnnnnnnnnnnnnnnnnnnnnnnnnnnnnnnnnnnnnnnnnnnnnnnnnnnnnnnnnnnnnnnnnnnnnnnnnnnnnnnnnnnnnnnnnnnnnnnnnnnnnnnnnnnnnnnnnnnnnnnnnnnnnnnnnnnnnnnnnnnnnnnnnnnnnnnnnnnnnnnnnnnnnnnnnnnnnnnnnnnnnnnnnnnnnnnnnnnnnnnnnnnnnnnnnnnnnnnnnnnnnnnnnnnnnnnnnnnnnnnnnnnnnnnnnnnnnnnnnnnnnnnnnnnnnnnnnnnnnnnnnnnnnnnnnnnnnnnnnnnnnnnnnnnnnnnnnnnnnnnnnnnnnnnnnnnnnnnnnnnnnnnnnnnnnnnnnnnnnnnnnnnnnnnnnnnnnnnnnnnnnnnnnnnnnnnnnnnnnnnnnnnnnnnnnnnnnnnnnnnnnnnnnnnnnnnnnnnnnnnnnnnnnnnnnnnnnnnnnnnnnnnnnnnnnnnnnnnnnnnnnnnnnnnnnnnnnnnnnnnnnnnnnnnnnnnnnnnnnnnnnnnnnnnnnnnnnnnnnnnnnnnnnnnnnnnnnnnnnnnnnnnnnnnnnnnnnnnnnnnnnnnnnnnnnnnnnnnnnnnnnnnnnnnnnnnnnnnnnnnnnnnnnnnnnnnnnnnnnnnnnnnnnnnnnnnnnnnnnnnnnnnnnnnnnnnnnnnnnnnnnnnnnnnnnnnnnnnnnnnnnnnnnnnnnnnnnnnnnnnnnnnnnnnnnnnnnnnnnnnnnnnnnnnnnnnnnnnnnnnnnnnnnnnnnnnnnnnnnnnnnnnnnnnnnnnnnnnnnnnnnnnnnnnnnnnnnnnnnnnnnnnnnnnnnnnnnnnnnnnnnnnnnnnnnnnnnnnnnnnnnnnnnnnnnnnnnnnnnnnnnnnnnnnnnnnnnnnnnnnnnnnnnnnnnnnnnnnnnnnnnnnnnnnnnnnnnnnnnnnnnnnnnnnnnnnnnnnnnnnnnnnnnnnnnnnnnnnnnnnnnnnnnnnnnnnnnnnnnnnnnnnnnnnnnnnnnnnnnnnnnnnnnnnnnnnnnnnnnnnnnnnnnnnnnnnnnnnnnnnnnnnnnnnnnnnnnnnnnnnnnnnnnnnnnnnnnnnnnnnnnnnnnnnnnnnnnnnnnnnnnnnnnnnnnnnnnnnnnnnnnnnnnnnnnnnnnnnnnnnnnnnnnnnnnnnnnnnnnnnnnnnnnnnnnnnnnnnnnnnnnnnnnnnnnnnnnnnnnnnnnnnnnnnnnnnnnnnnnnnnnnnnnnnnnnnnnnnnnnnnnnnnnnnnnnnnnnnnnnnnnnnnnnnnnnnnnnnnnnnnnnnnnnnnnnnnnnnnnnnnnnnnnnnnnnnnnnnnnnnnnnnnnnnnnnnnnnnnnnnnnnnnnnnnnnnnnnnnnnnnnnnnnnnnnnnnnnnnnnnnnnnnnnnnnnnnnnnnnnnnnnnnnnnnnnnnnnnnnnnnnnnnnnnnnnnnnnnnnnnnnnnnnnnnnnnnnnnnnnnnnnnnnnnnnnnnnnnnnnnnnnnnnnnnnnnnnnnnnnnnnnnnnnnnnnnnnnnnnnnnnnnnnnnnnnnnnnnnnnnnnnnnnnnnnnnnnnnnnnnnnnnnnnnnnnnnnnnnnnnnnnnnnnnnnnnnnnnnnnnnnnnnnnnnnnnnnnnnnnnnnnnnnnnnnnnnnnnnnnnnnnnnnnnnnnnnnnnnnnnnnnnnnnnnnnnnnnnnnnnnnnnnnnnnnnnnnnnnnnnnnnnnnnnnnnnnnnnnnnnnnnnnnnnnnnnnnnnnnnnnnnnnnnnnnnnnnnnnnnnnnnnnnnnnnnnnnnnnnnnnnnnnnnnnnnnnnnnnnnnnnnnnnnnnnnnnnnnnnnnnnnnnnnnnnnnnnnnnnnnnnnnnnnnnnnnnnnnnnnnnnnnnnnnnnnnnnnnnnnnnnnnnnnnnnnnnnnnnnnnnnnnnnnnnnnnnnnnnnnnnnnnnnnnnnnnnnnnnnnnnnnnnnnnnnnnnnnnnnnnnnnnnnnnnnnnnnnnnnnnnnnnnnnnnnnnnnnnnnnnnnnnnnnnnnnnnnnnnnnnnnnnnnnnnnnnnnnnnnnnnnnnnnnnnnnnnnnnnnnnnnnnnnnnnnnnnnnnnnnnnnnnnnnnnnnnnnnnnnnnnnnnnnnnnnnnnnnnnnnnnnnnnnnnnnnnnnnnnnnnnnnnnnnnnnnnnnnnnnnnnnnnnnnnnnnnnnnnnnnnnnnnnnnnnnnnnnnnnnnnnnnnnnnnnnnnnnnnnnnnnnnnnnnnnnnnnnnnnnnnnnnnnnnnnnnnnnnnnnnnnnnnnnnnnnnnnnnnnnnnnnnnnnnnnnnnnnnnnnnnnnnnnnnnnnnnnnnnnnnnnnnnnnnnnnnnnnnnnnnnnnnnnnnnnnnnnnnnnnnnnnnnnnnnnnnnnnnnnacctagttaatatttgggctgaggggatgggcagttggagacagggtttcttctgtgtagatgaggctgtcctgacattcattccagccacttttttttttaaaaaataaagaatgtaaaaatcacctctatgctaaccactcccagttaacaggtgttaatattttgtcaagatgactttactacagaacatccacaaatctggaagactttaaccagctttctagttttgagctgatagaccactatgttggctatcctcactactcaaaccaagagagggaagagagggctcttcctgtcctttgtaaactttgtagcgtttgtatgcttttttaaactttgtaaactcccaaggcaggaaagtggccaggcccctcccctcagacatccctaactgtcataaaggtgtttctagcctctgttactgtcacagaggtcatcaacagtactttccccagattctgctaactttagatgaaaagtctgagcaggaaatcccaccaatccctgagctccctcaagcccgggacttgaaatcccacacaatcctcaccctgtaacctctgccctagaaaactccatcccctgctgtctgctccctccagggaccgccaataaatctcttttatgacacttgctgcctggcataactctctggtcagaagagagcaagaagacaagaagcaatggaaagaagcaaagaagcaaagagaaggggcggggctgaggctccagagctcctgagctcagctggggtagcctcccctgggagctgcaacacctctgctgaggaggcttcctcagcactgcgtggttccttggctcccttgtctcaggatgcctttccactgagaaaccttctcctcacagaactgtgtggttcctgggcttctgagtcccaggacacctccccatccgagcaggaaggccaacgtgcaccactctggtccttttgaacactaactgcacgtgtgaggatttgtagaccagagctctgtggctgctttgccttttcacttccagaaggacactgcactaagtgtctgctgtttgtgacataatcatgcaacataaaggacttaaatgttacatggagatctgatcctgatactgtaacactcaattttgatacatttttttttctattcccatattgcctcattctgcagtcacataaaagtatcctgtatctactgccatcctcttgcctgtgtgtatataccaggtacaatggctgcttcgagaggactggtcaaatgtttagtcctccgttatccatatgtgtgctagctcagctgtgcgtgtgcagcatctgattgagtttccctgccttctctagaaagcccacttcctcatcccctgtaactttacatgtggatatacctctcgccatcttgttatctctggtgctacctgcccttgatgtatctgactggagcctgtccttcctgtgatcctggttgtgtcagaactcctcagaggccagccgtctctatgatcctgtgattcttggatcctgtgatcctgagatcctgggtgtgtcagagctcctagaagtcgagctgcctctgggatcctgagatcctggtgtgaccaagctccagagatcctgggatcctatgatcctgggcatgttggagcacctgagagtcaagcttcctctaggtattgtgggactgggtgcagagctaatgcgcaaggtctgctcagggaactggctcagactggaaggaagctgtgccacttggcagacgggttcctgcaatctggatccccctggtcccagttactccctgtgttggggcagatgttgtagcctcctcacccatgatcctgggctttttagagcacctgcgagttaagcttcctctaggtgttgttggaccaggtgcagagccagcacccaaggtctgctcagggcagcagaccagcgcacaccagaaggaccagggactttacctaagatggacgtggggcatgactcattagttcattagctctggcaaatttgtctttggctcaaggtatttttccataagaaactgccaccaatgcaggtttgatgtacatgtccttcatgtgtccaggctagcacctgccctgttcattgctacttgcttgttttatgtggtttaaatttattgtactaagaatttgcaatgtctgcaatcacatttctaaggctggcagaatatttgtcatgtgtgtgcctgtgtgcacacacacatgcatgtacatatgaacacaactgtgtgtgcagagtgcccaaatgttgtccgtgttcccttatcaaactgagaacacttatactaagcgaaagaagttacccctgtgtttgaggatagtagcctctctgttgacttccagaatgtgattttataacttttttaaaataaaagaacatttgagtgagagtatcgtcgtgagcccttccctacaggtgtctctttaacagccaaataatcctaataaaataaccagccacatcataactggatcttttatctccaaacagttcaacatcacacacatactataacctgctctttagtgaggagtgtaccccagctctttagtgaggagtgtaccccagctctttagtaagaagtataaccccatttgtggagaattgtgccattaatggtccattaacatcactcaattaaaaatacaattttgagaattcaaaacattcccgttaataaggggctaaacattttggcttttattacccaagacattaccatctccctccaagactcaagaacagaacaaccccgggggagttcctgagaatggctgaggagctgcttcctttgttcttggggtacaggctttcggagttcaaacccctcatgctcataccagccagaatcaagggcatacatgaaacacatacagaatctattgcatgcccacagagcgttctagaagacagtcagtgatgccctactttcttctacatctaagctacggcctatactactgcctgtggcaaatactttggaaccctagctgcaacacagttccatggacactcaggaagtttatattgtgctgtgctaaacagaatcctgactcactggcttcagaaaactgttggtagccgagaaagtccctgctgactgcatccctgccccaccttgggcctgcctgtccatcacaccctcacgacagagcccggggtgctctgttgtaagcagacgctggtaaaacctggtgattctgaacttgacagcatggccgaggggcttttcctgttgtttccagagtacctcactattgtcttagattgtttcgcttggttggtgttggcttttttgagacttttactatatgactcaaacagacctggaacttactgtgtagccagggcatccttcagctgttgcctcttggtgtctcatctctgcctccatactgagactgaaggcaggatctccacaccagcctatacttattttttactttgttgacacaatacgtgccctcatctctgacacagaagtgatctgtccttgctgacaatgtgttcgccactcttcagtgtgatacattggctccaatgtaaacagtgtgattacacactaaccctccagttcctcttaggtacaatcacctctcctagcttcaaggttcactcacagatgaaactaataccagacttgaccaaccacagaaagaagatgtccagaaataaaataccaaccctgtagactgtccttattacttaaacagcaccgcaatgccatgtagaatgttcacactgtctgtagtttttacaagtactgcagatatgttttacagtgtggatgtaccagagaatggtgtgtgcatacacaaagcctgccgctaatacaagagccttgaacatctgcaagatcagcaaccgagccccacagattgctgagagtgaagggcacatgtcacctcagccttgactaaggtggcaagcaggagacagtgtcctcctctgcctgcacatttccctgtaaccctcatgtcccctcccctggtcactgtctcactgtggtaggtgtgaatgcagaaatcactggggaaactgtacaagcatcgtggtttttctacaattctctgctttaaaatgtcactcaagatgctgatcaggagagtgggcagtttaaagccagcctgggctacacatatatttagaagcaacttggtacaatctcttacaaagtatgagggggactggggaaccagccctgtgttgagcactcaagcctgacagtgtacatgcagtgctcagaataaattatgtgcgcacacacacacacacacacacacacacacacaggcacacacacacacaccttcctgggtcatgttcttttctcagttttgattatattttgaataagcctccttttaaattattcactgaaagtacagacttaacaataattgaaaactgttttcctcaagtggttgctaagctacttgcttcaagtctccattaaacagagccttcaagtcacagatttcttccagttaaagaaaaccctggtgctcagagcccatttgacaattctttcccctgtgaaaagtcaacattggaacatggacctgaactcctgccctttgtacttttagggaccaagaaaaagaaagcaaagtcataagaaaatggaaagccatgaaatctgtgaacgtgagtaactattgtagagttgctttataacaaaatattccacaaataattgcaataaatttttgagggtctcgctttatgaccgaagctgtcctcaaacttgttaatcctcctgcttcagcctccagatatgataagatgtttggaattctgccggacatgggtggttctttttttccctttcttctttcttttattattttaaaagacagggtctggtgacaaagctacctataacttgctatgtagaatatactggtctccaactcacaaggatccacctgcctctgcctcctgaggggtgagactgaaggtgtgcaccccaacacccagaagcctgtgttctctaattttctgacaaacatttctgttgcctcgaccttcattttatttttgttcataggtaagtaataggccactgaaagctaggattggaactctgcatgtaaaacaacatggttcatgacacgtgagcaacatgctaattgcactatggaaactgcagggctctgtcctaggacatgtcagtggtgttggaaggaagggcaggagtgccatcttctgggatctagttgcctcacaacttagcatcattgaagcagtcagttcatcttttggtgatgtcaataccattcatgaggaagagtctggcaaagcccatgtggtggtgtggatgaaaatagaccccgtaagctccaatgtctaggtcttgatctacagttagtagagttgtttgggaaagattaagagccatgtcccttgccagggactagccccagcctttaggtactgaggtgggacacagcgttggatgaaggccaaaagctgatgatctctggccttataactctcttactgttgttactggtttctgaccattaacttctgttagcagcaggggatctaggaggctaggcgttccctctcccactgagtccagacaaggcaatccagctagaaatcccacatacaggcaacagctctggggacagcctccgctccagttggtcaggacctacatgaaggtcaagctgcacatctgctacatatgagcgggaggcctaggtccagcccaagtatgttctttggtttggtggttcagactctgtgagctccaagggtccaagggtgggggggatacccagggggacccccacccacttagaagagaaaggggggatatagggaaaggattatgggaggggtgtctaggagggggaagtgagcaggatataaagtaaacaagtgaaaaactattttaatcaaaaataaaacatatatacatatttaaaaagaagttagtggctaggggtatgttttctttgactggaggtcccctcactgattgggtgagagggtcagagttcattaactctttgtgagccagagaaaaaggaaaagaagatcgtgcatgaagagaaagcgcctgctctggacagagcagagaaagaaaagctccaacaaactttatttctgttttagagacagtatttatacttcctctaaaacttacctcgtacaacaggtagaacagttaaaacggggtaattgattgcatggttttctaaatacttttacattccagtaagctcacagtaaggcgatgattcatgtcgtgaatcaataagtcttaaggaataacggcagcattgtttacgtctttccattcagactagtacatcactaagcattcattatctgttactagccccccccatacgttcattatagtttaaagcaataatttctatgtcacaagttagcactgttttgtcaagagacaaatcatctgccttgtgggttttttttgttttgttttgtttttgtgttgttgctgttttgttttattttgttttgtttttccgagacagggtttctctgtgtagccctggctgtcctggaacttacttggtagaccaggctggcctcgaactcagaaatccgcctgcctctgcctcccgagtgctgggattaaaggtgtgcaccaccacgcctggctcttgtgttttattattttgcagtcttatacacttaaactagtcaagattttaatgtctgccctggcacctacaataaattgtccattcccattttgtgacctttagtgaccagacaatggtctcacacctaacctagaaggaatatcttccttgatccaagcctgctttcttttcctactgcgtttagcccgtgacacagaaaggttcatggagctctggttacagctattttatagggggcttgaaattgcttgaatacatttagaaaatcattatcaagaattatgaaatcgtcaatttatctaagcagcattaattcatgaaagttcatcttcatgttgatatgtaggaaatttgtccaatagggtgggctaatgcccaggaatcattaagctatgtgatagtgataggaaaggtctattagcagcaagaagcaatcctgccatgaagtctctgaggagacttcttgtatctcagcgctcacccatcacagtgttacaaaatggtgggccatctcctgaaagctcacttgcttgctttagcctttcctagatggcttctgacagaccctgatggagaagtttttatgtcactggctttgagattccaaaaggccacatcaggcccgtttaactctttcggcctcaaggttgtgtctcaagtagttcccaaccgtggtgcccatgtcaggcctacatgcttgttgcctggcttcttactgatgatcctgaccctgaccctctgaaactgtaagcctgaatgaacacctctttcataattgactggtcacggattctaatcacagcaatagaaacatagctgagccaggcagctttctggtgttttaagtgtttcctctaaaagacaaggacaaggcacagccaggtcttcctgaagctcccgtttgtccccacatttctgtgctcttacctctctgacttagcatcatcctttggttcaaggttggaaacagcactgcagccctaatgtgtgagcgctctggcccatacagtgagacattaacagagtgcctgttcctcacagcctggtgtcccccatgaactgacctctcggcatgtcctcaagaagaagacaggtcagattctccacctgaagatctaaacgcaagaggctgacctgggagctgggaaccaggcttggagcagagctccggtcccctgcaagagcagtatgcacctaacccagggagccaactctccagcccctacaggaagcattcatatcccaaaggactagctcctctgagggcgtcagtctcacaaaatactgcaagaatccaggtcttgctttcagtgttgctagcccaatagattgtcaattattgagacaaacacaagcaaacccaacttctgccccggggtcttggctaatggaattcctgcatgacagtgtgtgcagtccatgtgggagttcttcagcaatctggcagtgatgcaggcactctgaagagacttgcagaggcacatgtctctcagtccgactatcagggtgttgaaacaacagaccccagccagataaatgagaattttccaggaagctcatgctagtcaatggaaccggcaccagccagaggggaaacttatctcttggagaaagatttcacacagatctaacaactcataagaccaatgtacaggatgagactcaagcccagacaaggctgggtccatactgggcagggccacatcttgaccaggactagttagatatacatattcctaaccctctatttagactgggacttcacttcatgaccccaaagaactaagggaatgttgctggatgtctttgtccctctccccatgtggccacattgaataaaccaccttcctctgcctcacacctttaacttcgctctttttttttattactggcttcttgagtatgggttggtcaacctgatttaggggttgtgacccctaagttgataactggactgagagctgtatatggacgagaggcaggacacagaatgctgcagaatcagggcttttcaccagccagagaacactggtaaggcttggggggcttttcctgtctgactagccacctgttatgaacttgctgaccctctgaggcacacttgattacacacttgattacagaacagagcagaacacagagcttggtggaaatgagtctaggtaaacatcaccagctctggcctcaggcatcaccactgttctagatctgtagactgaatatgccactaattcagggtgttaacccataaccagtcacagctcagattctcagcaggtaatcctgtacactggattaggttctcctgatgaagtactagtgataagtctttctgtgaactgagctgtgggcattgatccttattcctaatggcccacactagatgtaggatgtcttagagcccctacggacctgccttgagaccttccttgacagctaaaggtctctagcagacccaagcatggcagacatggagccaacaggttttgcctttctctctccccattgctaaaccacagattatatttctaaagctagccaccaaggtctattcctttatttgactacttcctcttgaggctgactaccaatgttcagctatcaaagtattcaagtacagcagtcaatgccccctttggctgccacaatttgtatgccattcaaaacaaaccaactcatcctaacaggagcaatctaggaaaggctaaggctagcaggtgaccgtcctggagatgacccaccatctttgcatggtttgtgatgggcgcactcttgagagacatggccatggagctgtgagagcatccaggattgcttctcgcagctgttgtacctttcctaccaatactgcataccctaaggattcctgggcatcaacccaccctaccggtcacatttcctgaagagcaacatgaagatgaacttccaggaattaattatgtttagatgaatgaatgatttaatgtaattcctgatttgattaaaatactcttaagaagaaagggttttttttttcttcaatttgccaagctgtgactttattaactgaccaggttacaaaaatatcatgggtgacaccttagttcatccatctaataagcttgtttatctggtcgtccctgttgccagcatctccaccttctacaacgtgagttctgtttttcttctttccaccttgtgggaaggtcatttgaagccacgggaagctacttgctttcttgaatcctttcccagctgtttagatctcatgacctagatcctccatgcaggcgatgccaaatgtaccaagagatcgagcaatcaacgaattatctgtcaaggcgatccgcttcttgttgattttgccatagcctcacttgtaaatgagcttgtttactgacttcaggttgggatacccccgtgcaatgtacggttccacaatccgcagcatgataattgaagccttgttgagcttaacaaaggtgccagtgaagatctgtagaagacgaagaagctgcactaccttgcggacttttgggcttactcctctgatacctcagattgtaatgacaaaggccagttttggttctgcaggcacattgaagttcccagctctccttgccatcctggccatccaaatcgcagtccagtatgtctgcctatacttgtgatagtgccttgccttctcacagctgagcttcctccttccctcttgcagtgtcttcagggcaaacttcttcctcgggtgattcaccttcaactctgcgaaattcctttgctttttcttaagggtttctggcacagcggcaaccttctttttcttctctggaacatcctccatgcttccagccggaaaaggagtgaggaggaagaaagttttaagaggtggttttagttgttttgctagaaaagttatattcatgaatagaatgtgcccacgcctcatgatggtaagtaaaggcttcataataggaagtacaatgagctttcataattataataaaaagataaataaataggcttgggacaaatctgcgttcaagggaaaatattcagggtcaaagatgaagctacaggtgtgcactatgttaaggcaaggccatgtaaaaactgtggctctgaacttgtaacgagcttacagtgtgaaacactgctttgaacttgttatcgataccttcctgtaactccccttttttgtaacatcttctctatgaggtaattctttcttacatagagaacttttgccttaaagctataaaaaaacaagccaataaaggaaggtggtgcagccattttccactttgctgagtgtgagttgtctgtgtgagctctttccctttcttttctctctggtttagaaagcattagcaagctctgagcctctcagctggccctccagggactcccggcagacttcccagagaaagaagctctattaataaatccttttacttaatttccagctgctatacacatgttaattcactagaaatcagcacttatttaagcacaaagagttaagttttcagtgcttttttgaagcacagaatagcaataaagagttaagttcccaaaattcaataaagcacagagagttaaagagggggaaaaaagccagctgtcttcaaccacagagtaagcaagagagtgttaagtttccagaagccatcagcttctagcctccagtgcatttgtaaggccagagattatcagtcttgtagctttcatccaatgctgtgatccacctcagctctgaaacccaaaaggttgggacagacactggacactctctatccagaggcagtgcgttgtccatctgaggcaaacgtttcttcccccctccccatattccttgccccttccccctagttctccatagtcctgtctcttactttctgccctccgtccctctggagcaaataagtctcctttgtgctgagaacttggtcttggtgtgtcctgtgcttactccagtcctttcctaccagccttagcctttcccggatgtctcctgacacccttccatctctgcactaactgtattgttttctttcagcccccaaagtgactatcagcttccacagttctccagtcgccacgtctccaccatctgttcgctacaatgttgctgtcagctgcctttgctgatcctgtctgcccagcttctcccttactgcatcatggtacactgtgtgggaagagcgaaggagccagcatgctgggctctgctcatgctggtgaaagacattattacatggttttaagatcgcataacaccagggcgtatcagcactctctcatccaacagaggagaccagagcctaggcactctcctgcctagctattacagaggcctcagcctatcccaggagggaaaacaaactttctcctgtccgttccattttaagtgagataactgttcctataggtcatcctgacatggatttcccctttcccttgattatccgccattttcctatggatcatgtcagtctcctctctatccagaggcagtctgttgtccctcaggggcagatatcccttccccccctctcatagccctttccccttctccccggtctgtctcctgtctctgtctcttactccttgccctttgtcttgggtgcctttgggatacaccttagacattttaaggaaaagctaatttggagccaacacaaagggaatgagagatcagaacctttttagaaaccattgagtagcctggtgacctaccaagaagcactttgatgttcatgcccaaagcccagcctaagtggttcttgtaaaatagccaccatcttatgagttgaaaagctctgcataccaccatatctgcattaaagctataacctaagtgtgcgcatgttacacggctgaattaatgggagaaaatgaatgataaaagcatggcgagagcagaaactatacaaaaaacgattccttcctcatgcacaccctgcatgtgtgcgtgtatctcttctctgtccccctgaccaaactgtctaacaaatagaacttaagggacaagaatgtggctcgggcgctgtccctgtgctctttgaacagcatcgggcatgtcacagtgttgtcacttcacttcttaaaagacgcagggcaataaggaggagcatacaggaaatggccagcgaaagaccagagtctgcacagaacacactgagaccaagttctcagcacaaatgagattcctttgctgcggagggacaaagggcagggagtaagagacagacaggagacagagggctagggagaaggggaagggactatggggaggagggaagggatatcttccccagagggacaatggactgcctctggatagagaggatacacacatgatccataggaaaataaaggtttatcaagagaaaggggaagcccgtgtcagggtgagttgctttgttttaactggatatgttaactaggtgagccaatagggggcttctggctaccagactccaatacttagatagctggacctgtgtggtcagccccaggaggaggaaatggttaataagggactagaccttggtggctagctttaggaatataatctgtggtttagcaaggaggagagagaaaggcaagacctgtcagcaccatgcctgctcaggcccactagggcccttcagccagggtgacaccacccccaaaacccacctcccacatctcaccaaaggtgagctgattatgaacccatcaagaaatcaattcatccattaggcctgagtcctggctgtcgcataaagctccaccacaaacacacagatccgcagagcagtgtgcttcactgggtgttagttacaactgagtagataatcacagctccacaccatagtgagtatgcccaagatctactaattacaatcttaatctaagagtagcatgttaggaaattctctaaatagctcaactgtgtatttttgtaacaactggaacacatttctagtctggtcgtattatctacttttgcttctcaaaaccttcaggcagataaattaatttttaaaatatgtgctactatacaggctcatcttactgagctataaaaagtgacattcaggcatatcgacatgaatgaactgacataagccaggcgctaaaggacatggaatgtggggggtcactttatctcaggagagaaatctacagagctcagaagcacagcccagctttcctggggtctggagtggaaaaaggggatgggaaaatgtttactgtgtggatacactgaaaaggctctagaaatggactctggggacagttgtccagacttgtggatgaacttaagactgtcgtactgaccacttaaagatggtcaggacatttgccaccaacctctggcagtacctgtcgaggatctgcaagatgagaagccacagtctatagcatctagaagaatcccttactcaacgggatactttctcacgtgccctggtgggtctaatgatccacataggcaccaccagtgtttggggtggagtagacagtctagctgctgagaacacgggccccggtatctctgcattcggctccagactcaggtagacttgtacattttcagaaaacggtccattccactttatgccgagattatgctattaggcatcacctctgagttccaagctgactaaactgtgtgggctgttctgtttcatggttgccatagaaacagttgccacaatgctttggagagaacagaagggactctaagaatgtacagatagtgttggcttttcctggcttctgatctcttcagcagcctacgtctgtgatgactccacattcacagtgggaataaacatccagaaaggtctgtgactttggacaataaacactctcctaacaagcttctcctacccccatcccaacccttttcctcaaagatcagtagtaaaaacacagaaaccaaggattacataagcttcaggtatctccagttacctctccggcccacagaggtatagtgaacatagttaaaaaaaaaaaaaaaaaaaaaaaaagcttcctgacatctaaaaatagcatagtccactacagccaagactgcacctaataaccaaaactcagcaacatcactcactcgagataagacacagccctggaa

SEQ ID NO: 1125 - DNA, 1452 bp, Mus musculus
ctagaggcagtggtggccagatgcgaggtcgttggttgtcataaaggctgagctgctcgccatggtctctctgtggtttgtctcagattcttcgcccatagagagaggcattgaatacgtcgactctgacatttctcgtgagaatggtctttctagtaccagtgtagcaaaggaatcataaaatttgataaactgaagacagttggattagcagggaagagaagaggcacctcctctgccagccatgatgaaggaagcatcggagcctctagccagtgtcaccagcatcaataagcaagacagtaaagtacaggatggagagataagaaaagaaaaaattggaaccatcactccatcgaaacagcattcttcagtccacttcttcccaaagataatggattcagactccaccacgctcatcccgctgtcccgctcattttcccaagaaatgccaattggcttctaccagatcaccagcacccagaacagctccaccttatcgtccagaggacagctggcttctaaatccaccatcctgagctgctcccacaaagacagcagcctgggaaagcagagcaccagctccatggttccacggaggcagccccagtcgagctctgacgtggatacgtatacttttgggaatggtgaggattatttcctttctttgtttggagaatcgaagaagctcaccgcccacacaccccaagccgagaacgtgagcgaacacctttctgtgatccttgaggaagtcggccaatttacatccagttctctcggagagattaaaatagctgaggtaaatatcaagggcctctttgtgaggcttgtcaactcctccaatgaaaaggaagtagagattggaaaccacattctccaacaaaacgtgaatggacgcgcagtctccttgtaccagttccccgacaacatcacactgcaggccaactccacggtgacagtgtgggcagcagcttcggaagcaaagccacagccaccaacggactttgtttgggagggacagagcaagttccgatccagtccagactgcacaaccatcttgtgcaagcccaatggtgaggccattgcctggtacactcctatccactggaagcaagcctgggagaagttagagactgacattgaattcgaaagatgctcagtggtggtcccatcaatgagaaaccacatgtttggatggataacagcatctgtctcttccacaaacgaggagaaagaagaaccgatacagaaaacgccctcccaagtctaccctgtcctctacagggaccaagaaaaagaaagcaaagtcataagaaaatggaaagccatgaaatctgtgaacgtgagtaactattgtagagttgctttataacaaaatattccacaaataattgcaataaatttttgagggtctcgctttatgaccgaagctgtcctcaaacttgttaatcc

SEQ ID NO: 1126 - protein, 382 aa, Mus musculus
QGREEAPPLPAMMKEASEPLASVTSINKQDSKVQDGEIRKEKIGTITPSKQHSSVHFFPKIMDSDSTTLIPLSRSFSQEMPIGFYQITSTQNSSTLSSRGQLASKSTILSCSHKDSSLGKQSTSSMVPRRQPQSSSDVDTYTFGNGEDYFLSLFGESKKLTAHTPQAENVSEHLSVIEVGQFTSSSLGEIKIAEVNIKGLFVRLVNSSNEKEVEIGNHILQQNVNGRAVSLYQFPDNITLQANSTVTVWAAASEAKPQPPTDFVWEGQSKFRSSPDCTTILCKPNGEAIAWYTPIHWKQAWEKLETDIEFERCSVVVPSMRNHMFGWITASVSSTNEEKEEPIQKTPSQVYPVLYRDQEKESKVIRKWKAMKSVNVSNYCRV

SEQ ID NO: 1127 - DNA, 67111 bp, Homo sapiens
attattcacaatagcaaagagttggaaccaacccaaatgtccatcaatgatagactggattaagaaaatgtgtcacatatacaccatggaatactatgcagccataacaaaggacgagttcatgtcctttgaagggacgtggatgaagctggaaaccatcattctgagcaaagtattgcaaggacagaaaaccaaacaccccatgttctcactcataggtgggaattgaacaatgagaacactcggacacagggtggggaacatcacacactggggcctttcatggggtgggggcaggggggaggtatagcattaggagatatacctaatgtaaatgacgagttaacgggtgcagcataccgacatggcatgtgtatgcatatgtaacaaacccacatgttgtacacatgtaccctagaacttaaagtataataataattataataattatgcaggaagtatagtgattaaataaaattgggggattagcattctaaaaaaaaagactgtctcaaaaaaaaaaactgtaagtcaatgacaagagaaattttggaaattatacaaatacacgtgatattgtttggctctgtgtccccacccaaatctcaccttgaattgtagtaacccccacgtgtcatgggagggactcaatgggaagtaattgaatcatggaggtgggtttttcccatgctgttcttatgatagtgactaagtcttatgacatctgatggttttataaagggagttcccctgcacatgctctcttgcctgccgccatgtgagacaaccctttgcccttcctttgtcttccgctatgattgtgaggcctccccggccatgtggaaatgtgaggccattaaacgtcttttctttataaattacccagtgtcggatatgtctttgttagcagcatgagaacagactaatacaacatagaaattaaacaatatgctcctaaatgaccagtgagtcaatgaggaaattaaaaagaaaattgaaaatttcttgaaacaaataatggaaacacatataccaaaacctatggaatatagcaaaagcagtactaagagggaattttatagctgtaagtgcctacgtcaaaaaagaagaaaaatttcaaataacaggtctgatgatgcatctgaagaactagaaaaataagagcaaaccaaacccaaaatcagtagaagaaataataaagatcagagcagaaacaaatgaaactgaaatgaaaacaatacaaaagatcaataaaacaaaaagttggttttttgaaaagttaaacaaaattgacaaacctttagccagactaagaataaaagagaagatccaaataaataaagtcagagatgaaaaaggagacattacaactgatactgatctttcttactcctttaattgagtgctcctctcataggttaaaatttttacatattttaaacagggttcctagggggcgctagtgttccataaactagagaatcaatatttggctgttatgttgaataatgactgcctttatcctgtttgcagagggaataaaagctaatgaatagaatttctcaattcaaattgttctccaataatgtgttacaggctttggctccagactacttttctgctagagattgcccatatatgatagaagaaaatgaaactgcaaatttatatcaataggaaacctcaaaattaactatttgctcttggttcaaccatttgttgggtgttattttgtttcaagacacatgggctggtggttgtgatttcataagatagattaaaagagtataggtgaaataaatgtattggtttgtatttttttaaaaattactatacagaatatagtgttctgcaaataagagcaaatgttatgaatctttgtctcctgaacaagtctgaggtgtcctgacttgacttggaaaaataagtgctatattcctctaaagagtatgaatagaaaagatttgcagacagactactcctaaaatacatgtaatgtgtaaagtaattagacagttattttgaactattgctaaaattggtatgtctgaggattcaaaccagtgtttgagactcagcctcagaaatgcagatctaagaccttagtgttgtttttcaacaggattttgtgattgggaagctccatgaagattactttgaacaaactgtctgaaacttgaaacttccaatacatgtcctctagcctctcttgaaatacccctcgtaggagcttaatgtgactctaacttgaaggtaaaataatagcatctgtgtctgaggctgttattacacgtggatctgtgtaaaagaaatgaattgactgagtacatttttggactagcaaaaggctttataataggaatttatactatttttatgtgggtgtaaatatgaaattgaattcctacaattgtattccaaactctttgaatcttagataatggaacatgtcatagtgtttaaaattgtagtcctgaactgattattactcaactgcatattacccatggcctgagaggggaagaaaactatctttatatatgctgccttcattcacacaagacattttatttgtattaccaatttaataaaatctcttgctgtgcaaatcttctccacatgtggaggcagagaactaaaatatataaagccagttctttgtgttcttcaaatctttaaaaattgtgtatatgtaatattttgtctgttttttaaacttaagaatatggaattttgccacttttaattttttcttaaggtagaaatctcacaacatgaaactcagttttcattaccctaatttgacccacatctactcttatggggcttcaattccccagcaaaattctcgtactttcccaacgcggggtaaaggcaaagagaattgacagagtgccaagaagacagaggagagagtgatttgagatgatttgagaccagaccagaaaaagcaggatgaagctggttcaggaatggacaagcatttaggcagataccacagaaaaaggaagatatggaacaagagtaaagcagaaacagcaagtacagtgaggaggtctctctaatagatggatgagactaaatcttggctctgccatttactggctgtataagcttggaagaggtatttcatctcttggaacttccacttcctcatttggaaaatggggaaattctcatcttctagagctgtggtgaaagaaccgtataaagattattgcactggcacaatggctcacacctgtaatcccaacactttgggaagccgaggcaggcaaatcacttgaggtcgggagttcaagaccagcccggccaacatggcgaaacctcgtctctactaaaaatacaaaaattggccaggcgtggtggcacatgcctgtagtcctagctacttgggaggctaaggcagtagaatcacttgaacctaggaggcagaggttgcagtgagccgagattgcaccattgcactccagtctggatgacacagcgacatccatctcaaaaaaaaaaaaaaaaaaaaaaaagattattgcacctcatgcacctctgcttcttcctttcagttcttgctgaccctctccttcctgagcagacacagccatgttgatgacaccattaacatttgagtctgtgcatcccaaactgaggcttctattttagtctttttgctatggagaacttagatatttgcagtcaaaaataatcataatctataatgaatctccatgtaactattactcagctttaataattacaagtcatggcccaactttttcatctacattctcatctgcttcctactgtctgtattcattagaaacagaggacgtcatatcattttatctataaatgttttagtatgtatcactaaaagataagaacccttttcaaaaaacataatcatgacaccatatcacacctaaaatatttaccagttattccttaatatcattaagtaccatgtgcttaagtttctactgtcttataaatttctacagtttgcttgaattaggatatgttatatccacaaattacaaaaagtgtcttttaaatttcttagttgattagctaatgtgctcttctgtttcctgtattacatgtaaagcagaggattcatcagattcaggttgattttgttgctgctgatggtattattgctactgttattctctgtccaataagttgtatcaaccacatgaatactaccaagttgtattgctattggtgatgtaattttttccaaactgataactcttggaaacgtctgaacaaatcaatatagagtctttccggaatttaaacaataaatagttacatcctaaagactttggtatatactaaaactgcaaaaatattttgtatttatatgacatatagagctaggctttaggttcatataattctaatcttttttttttttttttaatgacggagactggttctgtcacccaagctggaatgcagtggcacgatctcagctcactgcaactccacatccccggttcaagcgattctcctgccttagcctccagagtagctgggattacaggcacccgccaccacacccagctgatttttgtatttttttagtagagacggggtttcatcatgttggccagactggtcctgaactcctgacctcaagtaattcactccctttggcctcccaaagtgctgggattacaggtgggaaccactgtgcctggccagataattgtagtctatttttcacctgcatgaatgcctagaaaggcacgtgtcatgtgggaacattatttactaagtaggattatctgccacattgtggaaagtctagcatctctgggttctgtctaccaaatgccactaatacccgacccgaatctttaatgactactatcaacatcctcttacatttacaaaatgctctctatggttcactttggcccctgttgaaaaccactaaattagtttaagcaacaacaaaagaggaaattggttttcattgcatatatacagtaatttaagaaaaggaaataagaaaaatgtctactatggggaatgagtattgaaacactcacaacttcaaagccttcaaaagtttttctcagctgacagaattttatttctccaaaatatgttggaaaatatgagcaggctctctgataaaaccaatgaggtcataacgactttatgctaatatatgcagttcaagtagagaaatttttaacagctagaaagccatccagactggtacaggtagggagactgggagagtgacaagaaatgacaagcccatttttaattctttactaagcgtaagtaaaaatttataaaccttctgatgctatatttacataattggcccataatgttcataaggaattgtgcttcatctctgagagggaggaaatacggtcaaacgtttacttccttttaacttaccttattacatgttacacgtcttgactttttctttttggctttttaagacagttactttattgtctttaaaaatcattttcaaatctatattagaagatattttagtattatttctgaaagcaggtattgtttattcatggtacctagccagtttttaagaaatagtagaatcttattaactatttttaataagcttactcatccagtaatcatcatttatatatcttattactgtatataatcatgtactttcatagttattaattttattgccatactatcattatcatgaaacattaagtgtgagtgttttacacagaggagaaactgaattaagtgatttcttctaaatcatactgctggcataactaggagaagaatttaggtgttctggctttgattttatgatttctaccaatagacttctttttgcattgaagttttatggtttctattcttgctgcctagctgtttccatgtgctcaaagtatttgtccagagagagagaaagaaaaaaaagaagaaaagagttgtgattaatttccccagtatgtacatactggccttgactcttagaaatacaaaacaagatatcaataattttggtggcaaagtctagtggaagatatggctttcctaagagcaaattactttatttaatgtctgcaaactgcaaagaaggtacagcatcaacataggaattgttcagaaactggaacttggttactatggagacattacctcatagttctaagaggcagtgttggccagaagcaacaactgtagtcataaaggtctctttgccaagttactgccctctcaagctgcttccagtgaatgctacacacctgcaccatggtttgtctgacatccttagccaagatcaggattggctatgttggtacttacatatcctcatgagaattgtggttctggtactagtttggtaaagaaattattaaacctagctgatgcttgaaggtagttggattaacaggtgaggtcactttgaaaagaaaaatctgccttgaacctcagccatattcgtcatctgatgtcatgatctgctttcctaggaaagaaaagagacttcttttctagccaagatgaaagatacacaagacattcaggaagcttcgaaggcaatgcagaataaagtccatgagcaggaagataagaatgagaaacaaaaacagtgagcatgcatagatgcgatggaagcagagttagagctgagttatagaggaggaatgatggcatgcttgacctcttttgtttcaatactcttatgaaccagttagaactagaatatatctcacaaattttctagaaataatggactgtagcatacaactacttccacaactactgttttataaggttctagtccttgagaagtataaaaatccacctggacagatctccatagtataagacctagctgagattccagccaaagttccctttttttttttttttttttttttttttcagacagagtgcagtggcgcgatcttggctcactgtaagctccgcctcccggtttcacgccattctcttgcctcagcctctcggagtagctaggactacaggcgcccgccaccacacccggctaattttttgtatttttagtagagacgaggtttcaccgtggtcttgatctcctgacctcgtgatctgcccgcatcggcctcccaaagtgctgggattacaagcgtgagccaccgcgcctggcctccaaagttcccatttaatatgttaagtcaatttacagaaatagtttctttctagaactattttacagaactggggacaaaaaaattaccagaatattggttttggaaatgtccgtaagaatgttatataaaattataatccctatttttacatttaatataaatcattcatcaactaaagcattaccattggttttccaatgttttctttaaaattgacttattgagtatacataatttaaagctattgttactttggacctacaagtcctatgtttattgttcagtccaagtccatttttaaatatttgttcttagaggtcctctgagaaatgattgtcgtcaatattatcaatgcagcgtctcccaaagtaacactgaaatgctagacttgagcttttgtaactgcccctgttttaatgttaatcaattacggagggagtgagataccaagaaggggcttagaaaattacttatgcttaagggaaagttaactaagcactgagaaaaatctctcatcttccaaaagaagactaataggtaggcaagtggaaggttcaggtgatgggctgtatcacacgagtttgttcctgaaatgtctcagctctttcaaagatgtgtgcagccattagaaatttcttattcggccaggcatagtggctcatgcctgtaattccagcaatttgggaggccaaggcaaaagaatcacttgaggccaggagtattagagacagcccgggcaacatagcaacaccacatgtctacaaaatttttttcaaaattagcaggcatagtgccatgtgcctgtagtctcagctacttgggaggctgaggcgggaggatcacttgaacccaggagttggtggttgcagtaaactatgattgtaccactgtactccagcctggatgacagagagagaccctgtctcataaaaaaagaaaagaaaagaaaaaaatttcttattcacctaccaaaataagaacaccctatagctccaggacaggtttctgtgattgcaaagattttgttaagccttcttgggagtcttctgtggaattaaatttattttaaagtgctattgttttactagaggaaaaaaattgagatcttataaaatgaacatgctgaaaagaatagccagtctgttatgaagcccagatgtaaggaatgttgaaagagaaaagcatttctctgcatttctctgctgttgtagtcaatgtcagggagaagtcgtgtcttacaatcctgtctcatgttgaacacagatgaaatatctgtaatctgacagtttacctctaaagtctccttcccactacctctacggtcatactcaatagtgtatcttcataggttagagcttttctgacaaatatgaatgcttggagtgtcagcaggatgttaagtgcacatgcttcttaagcactgggctagtaatcatgacattttcaaagccaatgccatttaattattttaaaaatttgcctgagatgtctgtgtctgctgagaggcacattaaagagcagtctagttttgaatacaaaactctccaggtataagatttctgataaaggaactttcacattgtagaacaaaatgattgtgaatacctcttggtaaacagagatattgagggtgacagcagcaagatggcagagtaggaaactccaggccctcattctcctgtaagaacctgaaagaacaacaaggagaggttggctaacataattttataagagctttgggaaatagatcaaaacagagataattcatggaggcaaaataattagttcctgacttatagtggatagatatgtggacccccagaaaggggatggctgaactggccatttgtctcatttttcagagaaataaagggtttggattggaggattttgttcacaatttaagcactgaacacgcatgcatacacacatgcacccacaaaaattgctttgacgtcactgggaagagcctcagtgtgactcataaaatgaaacgtcctaagtcttttcaggattcatgtcaatgaagtgttgtttaacttgtaaaataattgtactgaagcttatgaaccttgttcaaatgattgtgcactagttaacaaatgttcctttagatataaaaaaggaaatctttgttcatagtaagattcacttataaaaatagtacacgaaaatgatctttcttctccctctattctgtcattccctccaatacacatacacacacacaaacatgtacagtttatttgaaggcagacattcactaaacaatcttaattaatatagaaaagttagttaagcagcaacaagaattaaaggaaaagcatataggaaacaatgatatattaaaccagaattataatcatgattttatgataacggaaagggaaaataatggtaagtgatcaaagtggaggtataaatggcttataaagtctccacttagagtaaaaagtacatttaaaagcctggaaggagatggtaaaatgtcttgttggtggcattgtaatgattagtattatcttttttctacttacacattttcagaactatctacaatagaaatttgttaattttcaaatatttttaaagcatacaacaaattgataataaagtgttttatttagattgttaaaactagaaatacaagatgttattgtgcttgtgttggatgcatattacctttgaaaagcagaattctgggtaataataatagcccatgcttcttttattcacagccacttttactttcttatttatttatttatattatattttttgtacacagaagagaagacaaacttggagtatattctttagtacatttttccccaaagatgttgggttcagttgccacaacactgccattgtcatcttcaaattccagtggaatgcctcttggttactatctgtctagtcctcagattagtagagtaactatatcaacaactggacaattgacttctaaagctactgtaggtagctgttccagagtggaaaacagcttgggtaagcaaaatatggaacccatatttttagagtacttttaaagcttatatttcaatagattgcatatatgactctcagtcagaatgatgttttattattactcccccaaaatgctaacttcctagcatcttatgaaaagtaacttaactatggtcatcactgatcctagaactggggtattaaattcaggccacatacatgcatgtgccaaatatatcatccttataattaaggtatcttgagttatcatgatggttcatgagttgaccgctaacatacattagaattgctagagaattaaaaattccaatgtatagcattaactgcccttcctctgaacactaccagaaggattaaataccagaaggattgtgtattttgtgcctttacgagatgtatggcttaagtaacgaatagacaggtagatgagacaaagaagtaacataaagtaggtataaaataatggagagaaaatggtaaaacaataaagagaacttgaaggagaggaaaatgaaaacagtactatgatcagaaaaagtaaagttttgactattatcaacaatgtgctcagcaatacccatgctctagggtgtttgtttctcaccatgtttagggaactttgagggtatgtttccgtggtttactgaaaacactatcatcctttgaaacacaggacctactgtttttctacaatgttaggcaccaggtagagtacgtaacatctctgcatctcattttccacaaatgcaaatggggattaaaatagaaatgtcacagggctatcctaaagattaaatatttatgaaaattacctagcacataataaatactcaataaacattagttatgaatctgaacgtacctgtaagcaccttcttttaaaatagatgagatttggggtttgtgtttcaattgccaatcaactaacaagtttcaagtttcaaaactggtagcacaaatagtccagtgactatctgatgcctccattatcctctaacattctgtgcccatttacagcctggctgcccctcatctatatttcattttgtttctaatatatttcattttgtttctgatattttaaaaaaatctttgacatgggttatatagggtttttttttctcctgccattatggtcagattccctatgtttcattttttgtatgacaagtataaaatttcccaagaaacctcctaagtttacattgacctttaggatgaccaaaacccatatactgaaaatgaaaatacaaattttagatctgggaagaaaagattttctatcattcatcattatatcatcatggcatatgttctatatttgggttaaactttggctccttgtaatggggcaaaaaaatgaaatacagtggcttccccttatggtatgggagctgaattgggatgtagtcttctccttccattactgtagattccacttctctagatagatgtataggttcactgagatttgttgcacttggttcattgttatcttttgttctagacaaaataacaactgggaccaaagttaatgtgtcttcttttcttttggaataccaaggcttttatttctcaagatgagctgttaagaaagatgctgtatattatccttccccaaaggaatttaaggattaaggaagtacttgactgagaatgaactaatgtaattccaaatgctttttttttctcagcaaaatactttgaggaatctgctttaaaaacgatgattttatttctttatatctttcaccttgttttggttttgctaaagatgtaagatttaaactctagattgtcttaatcctttgaggattttggaccgagagtcacattaaccaaaactctgtactgtaataatagctatcatttattagcagataaatattaaatattatgctagacacttacatgatctccagctctcttatctccttacacaaggtggtgatggtatctttattttatgttcaggaaaacggaaacttggaaaacttacatcacgtggcttagtaaatggcagaactgaaatataattacaagtctgtctaaatgcaagacacgttgttctttccacttcatcacgacgcgtctttgtaatgtaactccccctttgcggatatattattagatttgtccagaatggctctttatgcttaaaattatgaaaactatattgtatttgaatgaaagtagtgaggatttaaaagagcaaacttctaataggacactggaatctgattaagcatgactttatctttctaataaagtattttaattaaatagaggaagtttaagtctttacctggcaagagtactaaccattgcaggaaaggattcatatgaggctttaacttatgggtagccatttgggaattttagcatacatgaagtagaataaggctatatttatatgtaacatatctaaatttgacagactaaaatgttttccctatttcaaaattgatgatgcttctagtacaactaaataatcagttaaatagtcattattctaatgatataatttattgtttaagataactgaaatactctttaggaactgaagatgtcactataaatatccacttactgattattttataggcttttgtttaaagcttctaactattctcattaagtttgatagtgatattaaaatgtaaaaatataattttgtagaagcagagaataaagataatggctttaggtccttttaatgtcattttatttacttctctcctggttacttctttcttctgtctacttgaaagatgccagccccttctcagttccgaagaaacaggatgaatcacccatgattggggatggagaagattatttcctttctttgtttggtgattcaaagaaacttacagcacactcaaactacactcagaaaactttaaaatacttttctatgattcttgaagaagttggccaatttacctccaggtacatattttatttgaactacttagtatcttctgtcggggtaggaccaataaatcagcagaaaacaaagttctaatctgtagttatatgcattattttatctaaaacactaatcagttcattgaaatataactgtttcatcttctgagcaattaaaataaattgatataatggtctaaagaaccaaacaagaaatgtgacttcttcaaagatgccagagtaaacaatgctacataatctttactaatagggtcaactcaattattcaaggcacttttttatcgttgttgaattatttagatggatctaatatatatattttcttctagtagctcttgagttcaagacagaaggagaaagataaatttttacttcattgatccatttttatgactgttagtatctatgcaaaaagaaattgatcaggaagaaagttgatattaagactaaaataaaagagttatgatcaattcatttatattaatataaccatgccttacttattacatgaacaacatactgaatttgaaatgctagtaataagacatgttgatagaagttgttagatggctaaaagaaatcagagttgagggtcagatatgaaggaaattttctctccctttatgccatgtttcctaaaatcaatcacccatgccctattacaatttaacagtggagaatacctaagcatttttctctactgtctaaaaacacctcatcagatccttcattcagtacctactatgttaaaatgatgagcagtttggaacaaaataaaatgttcaaagcttctgttaaaatgcaatcctattaaaaatggtggtgtagaagcaagatgtcttcaatccctatccagccaccccagaaaacaaaaacaaatatacagtgccaagattatcattatcatcagcagtatctcagaactcaaatatgaggatgagacaattcctgaggccacagagaagtgagaaacactcgtataataattaagctccccagaggtcaaggacaaagagaagaagctaaaaactgtgagagaaaagaatttgtctagcaacagacttctcagtggaaaccatgtaggtcaggaggtaatgagacaatgtttttaatgtgttaaaaccctgctatccaagaatagtgtatccagccaagctatctttcaaatatgaggagataaaatctttcccaaacaaaagctaagagaattcaccaccacgagacctatcttataagaaatgctaaggagagttcttcaatctgaaacaaaaaaacactaatgttcaaaaagaaaacacctgaaagtataaaacctctggtaaaattaagtacatggaaaaacccagaattgtaattgtggtatacaatccactcattactctagcgtgaatcccaaaagacaaatctatcaaaaacagtaatagctatagcagtctgctaagagataggcagtataaaaatacgtaaattgagaaaactaacagtcaaaatatggaaggatggagttccagtctagagattttttctttgtttctattctttctttttttctattctttcctttgtgattcaaggtaagtattcatctctttaaagtaacttgttatagctgtaagatgttttttgtaagcctcatgtaaccacaatgcaaaaacctataatagattcacaaaaaataaaaagcaatgaattaaaatatactaccaaagaaaattacttaaccacaaaagaatatagtaataaaggacaaaaggaagagacaaattataaaacaacccaaaaacaagaaataaattcttcttttcaataataatacttaatgtaaatggactcaatactcaatttaaaggcatagagtggcttagggataaggaaacaaaatccagctatatgctgcctagaagaaacccacttcacctacaaaggcatacagactgaaagtgaagggatagaaaaactattccattcaactggaaaccaaaaaagagtaggagtagctatacttatatcagataaaatagactacaaatcaatgactataaaaagagacaaagaaggtcactatataatgataaaggggtcaattcagcaagaagatataataattataaatatctgtacaccccacaccaaagctcccaagtatataaagcaaacgaatagatttaaacagagatatagactgcagtacagtagtagggcactttaacatcctattctcagtaatggacagatgaaccagacacaaaaatcacgaagaaacatcagagttaaattgcacattagaccaatgaggcctgacatgtgcagaacatttcacccaattgctgcagaatatacattcttttcatcagcacgtggaacattttcctgaatagactctctcttaagccacaaaacaaatatcaaaaaagtaaaaattatgtcaagtacttttgtgaccacattggaataaaaccagaaatcaattattggaacttaggaaaatacacaaacacatggaaattaagaaacacagttccaagcaaccaatggatcagtgaggaaactgagaagaaaatttaaaaatgtcttgaaacaaatggaaatggaaacacaacataccaaaatctctgggacacaaaaaaaagcagtactaaaagggaagtttatggcaataaatacctatatcaagaaagaaaagcttcaagtaaacaatctaacaacgtatctcaaggagaactaggaaagcaagaaaaaaaaaacaaactgaaaattagtagaagaaaagaaacaataaagatcagagaaaaataaatgaaattgagaccaaaaaatatagatcaacaaacaaaaagttggcttttttccatggtgttggattgtatcaaatactttctatgcatctagtgagatgatcatatggtttttcttttttaatgttaaacatcccttcacttttaccataaatatttggtcataatgtttatgttttactatactgtttgaattccatttgttaaaatattgcttcaaacttttgcatcaatgtttgtaaagattattggtctgtagttttctttccctgtaatgtccttgtctgttttggtatcacagtaattccactgtttatggaatgagatgggatatagtctctcctttatccttttctagaagagattgtgtagaagtaattttttttcataaatgtcttatagaacttattggtgaagccatctgggcctggaatttctttgtggtaaagttttaaaactataaattgtttttaaatagatattaggctattctaattatttcttcttgaataagcttgggtagtttttgtctttcaagaaatgtgtccatttttatctaagttgtccaattatttgcataatgtcatttataatattctcttatccttttaagaactgtagaatctttattggtatcacctttctcatttctcatatggtcatctgtatcttctctttttcctgatcatatcactagagatttagttttattgagctcctcaaagaacatgtgtttggttatattggtttcccctattttttgttttttatttaattgattttcattttgggctacattccctttcttctgtctactttgggctttttttttttcttctttttttatttaatttatttatttttattatactttaagttttagggtacatgtgcacattgtgcaggttagttacatatgtatacatatgccatgctagtgtgctgcacccactaactcgtcatctagcattaggtatatctcccagtgctttcccttccccctccccccaccccacaacagtccccagagtgtaatgttccccttcctgtgtccatgtgttctcattgttcaattcccacctatgagtgagaatatgcagtgtttggttttttgttcttgcgatagtttactgagaataatgatttccaatttcatccatgtccctacaaaggacatgaactcatcattttttatggctgcatagtattccatggtgtatatgtgccacattttcttaatccagtctatcattgttggacatttgggttggttccaagtctttgctattgtgaataatgccgcaataaacatacacgtgcatgtgtctttataccagcatgatttatagtcctttgggtatatacccagtaatgggaggctgggtcaaatggtatttctagttctagatccctgaggaatcgccacactgacttccacaatggttgaactagtttacagtcccaccaacagtgtaaaagtgttcctatttctccatatcctctccagcacctgttgtttcctgactttttaatgattgccattctaactggtgtgagatggtatctcattgtggttttgatttgcatgtctctgatggccagtgatggtgagcattttttcgtgtgtctgttggctgcataaatgtcttcttttgagaagtgtctgttcatgtccttcgcccactttttgatggggttgtttgtttttttcttgtaaatttgtttgagttcattgtagattctggatattagccctttgtcagatgagtaggttgcaaaaattttctcccattttgtaggttgcctgttcactctgatggtagtttcttttgctgtgcagaagctctttagtttaattagatcccatttgtcaattttgtcttttgttgccattgcttttggtgttttagacatgaagtccttgcccatgtctatgtcctgaatggtaatgcctaggttttcttctagggtttttatggttttaggtctaacgtttaagtctttaatccatcttgaattgatttttgtataaggtgtaaggaagggatccagtttcagctttctacatatggctagccagttttcccagaaccatttattaaatagggaatcctttccccattgcttgtttttctcaggtttgtcaaagatcagatagttgtagatatgtggcgttatttctgagggctctgttctgttccattgatctatatctctgttttggtaccagtaccatgctgttttggtagccttgtagtatagtttgaagtcaggtagtgtgatgcctccagctttgttcttttggcttaggattgacttggcgatgcgggctcttttttggttccatatgaactttaaagtagttttttccaattctgtgaagaaaggcattggtagcttgatggggatggcattgaatctgtaaattaccttgggcagtatggccattttcacgatattgattcttcctacccatgagcatggaatgttcttccatttgtttgtatcctcttttatttccttgagcagcggtttgtagttctccttgaagaggtccttcacatcccttgtaagttggattcctaggtattttattctctttgaagcaattgtgaatgggagttcactcatggtttggttctctgtttgtctgttgttggtgtataggaatgcttgtgatttttgcacattgattttgtatcctgagactttgctgaagttgcttatcagcttaaggagattttgggctgagacagtggggttttctagatatacaatcatgtcgtctgcaaacagggacagtttgacttcctcttttcctaattgaataccctttatttccttctcctgcctaattgccctggccagaacttccaacactatgttgaataggagcggtgagagagggcatccctgtcttgtgccagttttcaaagggaatgcttccagtttttgcccattcagtatgatattggctgtgggtttgtcatagatagctcttatcattttgaaatatgtcccatcaatacctaatttattgagagtttttagcatgaagggttgttgaattttgtcaaaggccttttctgcatctattgagataatcatgtggtttttgtctttggctctgtttatatgctggattacatttattgatttgcatatattgaaccagccttgcatccaagggatgaagcccacttgatcatggtggataagctttttgatgtgctgctggattcggtttgccagtattttattgaggatttttgcatcaatgttcatcaaggatattggtctaaaattctcttttttggttgtgtctctgcccggctttggtatcagaatgatgctggcctcataaaatgagttagggaggattccctctttttctattgattggaatagtttcagaaggaatggtaccagttcctccttgtacctctggtagaattcggctgtgaatccatctggtcctggattctttttggttggtaagctattgattattgccacaatttcagatcctgttattggtctattcagagattcaacttcttcctggtttagtcttgggagagtgtatgtgtcaaggaatttatccatttcttctagattttctagtttatttgtgtagaggtgtttgtagtattctctgatggtagtttgtattcctgtgggatcggtggtgatatcccctttatgattttttattgcgtctatttgattcttctctctttttttctttattagtcttgctagcggtctatcaattttgttgatcctttcaaaaaaccagctcctggattcattaattttttgaagggttttttgtgtctctatttccttcagttctgctctgattttagttatttcttgccttctgctagcttttgaatgtgtttgctcttgcttttctagttctttcaattgtgatgttagggtatcaattttggatctttcctgctttctcttgtgggcatttagtgctataaatttccctctacacactgctttgaatgcgtcccagagattctggcatgttgtgtctttgttctcgttggtttcaaagaacacctttatttctgccttcatttcattatgtacccagtagtcattcaggagcaggttgttcagtttccatgtagttgagcggttttgagtgagattcttaatcctgagttctagtttgattgcactgtggtctgagagatagtttgtcataatgtctgttcttttacatttcctgaggagagctttacttccaagtatgtggtcaattttggaataggtgtggtgtggtgctgaaaaaaatgtatattctgttgatttggggtggagagttctgtagatgtctattaggtccgcttggtgcagagctgagttcaattcctgggtatccttgttgactttctgtctcgttgatctgtctaatgttgacagtggggtgttaaagtctcccattattaatgtgtgggagtcgaagtctctttgtaggtcactcaggacttgctttatgaatctgggtgctcctgtattgggtgcacatatatttaggatagttagctcttcttgttgaattgatcccattaccattatgtaatggccttctttgtctcttttgatctttgttggtttaaagtctgttttatcagagactaggattgcaacccctgcctttttttgttttccatttgcttggtagatcttcctccatccctttattttgagcctatgtgtgtctctgcacgtgagatgggtttcctgaatacagcacactggtgggtcttgactctttatccaatttgccagtctgtgtcttttaattggagcatttagtccatttacatttaaagttaatagtgttatgtgtgaatttgatcctgtcattatgatgttagctggttattttgctcgttagttgatgcagtttcttcctagtctcaatggtctttacattttggcatgattttgcagcggctggtaccggttgttcctttccatgtttagcgcttccttcaggagctcttttagggcaggcctggtggtgacaaaatctctcagcatttgcttgtctataaagtattttatttctccttcacttatgaagcttagtttggctggatatgaaattctgggttgaaaattcttttctttaagaatgttgaatattggtccccactctcttccggcttgtagggtttctgcctagagatccgctgttagtctgatgggcttccctttgagggtaacccgacctttctctctggttgcccttaacattttttccttcatttcaactttggtgaatctgacgattatgtgtcttggagttgctcttctcgaggagtatctttgtggcgttctctgtatttcctgaatctgaacgttggcctgccttgctagattggggaaattctcctggataatatcctgcagagtgttttccaacttggttccattctccccatcactttcaggtacaccaatcagacgtagatttggtcttttcacatagtcccatatttcttggaggctttgctcgtttctttttattcttttttctctaaactttccttctcacttcatttcattcatttcatcttccattgctgataccctttcttccagttgatcgcatcggctcctgaggcttctgcattcttcacgtagttctcgagccttggttttcagctccatcagctcctttaagcacttctctgtattggttattctagttatacattcttctaaatttctttcaaagttttcaacttctttgcctttggtttgaatgtcctcccatagctcagagtaatttgatcatctgaagccttcttctctcagctcgtcaaagtcattctccatccagctttgttctgttgctggtgaggagctgcgttcctttggaggaggagaggcgctctgatttttagagtttccagtttttctgttctgttttttccccatctttgtggttttatctacttttggtctttgatgatggtgatgtacagatgggtttttggtgtggatgtccttactgtttgttagttttccttctaaaagacaggacactcagctgcaggtctgttggagtaccctgcagtgtgaggtgtcagtgtgcccctgctggagggtgcctcccagttaggctgcttgggggtcaggggtcagggacccacttaaggaggcagtctgcccattcccagatctccagctgcgtactgggagaacccctgctctcttcaaagctgtcagacagggacatttaagtctgcagaggttactgctgtctttttgtctgtgccttgcccccagagatggagcctacagaggcatgcaggcctccttgagctgtggtaggctccacccaggtcgagcttcccggctgctttgtttacctaagcaagcctgggcaatggtgggcgcccctccccaagcctcgctgctgccttgcagtttgatctcacactgctgtgctagcaatcagggagactccatggggtaggaccctccgagccaggtgtgggatataatctcgtggtgcgctgttttttaagcccgtcagaaaagcgcagtattcgggtgggagtgacccgattttccaggtgccgtctgtcacccctttctttgattaggaaagggaactccctgaccccttgtgcttcccgagtgaggcaatgcctcgccctgcttcggctcgcgcacggtgcgtgcacccactgacctgcgcccactgtctggcactccctagtgagatgaacctggtacctcagatggaaatgcagaaatcacccgtcttctgcgtcgctcaggctgggagctgtagactggagctgttcctatttggccatcttggctcctcccctactttgggctttatttgctttttttttctcccctaattttttaaggtgaaatttgaggtcattgatttgataccttcttctcttttgatactacagatatttggtgttataaactttcctctaagtacagcttagtggcatcccacaaattttaatatattgtatttttattttcattcagttcaaaatactttctaattttcattttcttttttatccttgggtaattgaaaagtgtgttatttagtttcaaagtgttttacagatttttcagttccagtgattttccagatatcttcttgttattgatttctaattaaattccattgtggtcaaagaacatactttgtatgacttgaatccttttatattgactgagacttcttttatagccaggatattaattattctggtaaatgttccaagtacacttgaaaagaatatgtattctgctgttgtttagtagaatgtttcatgtcaaccatgtcatgttggttgatagtgttgtctactgtctttttgctgatttttttgtctacttgttgtatcaattattgagagaggggtattaatatctaccaaagttgtggatttgttgatttctcccttgcaattcaatcacttttgtttcatgtattctaaagctttgttattagatgtagaaacagaaacatttaggaatgttacatccttctgatgaattgatccttgtatcattttatgaaatgactttctttatcctggcaatattctttgttctgaaatatattttgtctgatattaatatagccacaggagctttctttttactggtgttagcatggtatatatttttccatactttaactttttaactatttgtgtctttatatttagagtgaatgttttgtaggtagcatatagttgagacttgctcttttagccaatctgaaaaatctctgtcttttcattggggcatttaaactatttacatttaaggctatcattaatatgattaggtttagtctaccatcttgttatttgttttttctttgtcccagtttttctcatttcttcaatattttcaagatcttgctctactacttttgtctaaattgtttcaataaattttctttcatttttgtatttgctcctctgcacaaatattccgcttttaagatgttctcattatcattatttttgggagatttgattatgatgtgcctggtgtaaatttcttcaaatttcctatgcttggggttgttatgctttttgattagcatatttatatattttgaattttaaaaatttgggaaaattttttatcattatttcttcaaatattttttgtccctgcttcctctctccttttaagggactccaatttcacatatattaggccacttgaagttgtaccatagtttactaatgctctgttattttttatctttttatgtactttttcctctgattgtttctttttggatggtgtatattgttatgtcttcatgttcactgatcttttcacctgcaatgactactattatgttaatcccatccagtgtatttttaaatctcagtcatgtctctacattttgaacatacaaatacagttataaggatttttccttttctactgtttctaacatctgtgtcagttctgcatcattttttattgatttttctccttgttatgggttgtatttttcaatttatttgcatgcctggtaattttttattgtatgtcagaaattgtggattttgccttgtttgggggctagaatatttttgtatttctatgaattttcatttcttgagttttgttctgggacccacttaagttacttggaaatagtttgaggctttaaggactagcttttacagtttgttaggtggaaacaaatcaatgtcttcactttgttattaattattctccactagtgaggcaaaagtctccttagtactgtacacaaggccccattaattatgagctttttcagtctggctggtgggaacttccttaccctgtgacagcttcaagtactgttccttctaatcttttcaaaatagtctttttctacagtcttggggcatttactcaaatacatgtgctgatcagtcttctgctaaatactcaaaggggaccatctgaaaatcgccagcactctttttgcagcttcccatgtctgatactctccttgtgacctccagccaccttggtctccccagactctcagctccatctcctcaagtcagagaggatgcaccctccatgatgcagccttgaaattttctcgagaaataatctggggaaattttaagtctcactacatttctcttctgtctctcaagtatcactattctttgttgacaagtatcaaatatcttcaaaaatattgtttcatatatttttccagatttttagttgtttcagatggaaggctaaagtcacttcttgtaacttcatctaggctggaaacagaagctgattctcaatttggttgttttcaatcaaagctgttgtttctttcctactaccacccactatctctagggatttgtttaatatctgacagcagaaggaaaaaaaaaggagttgtaggcaaacaggaaacaaagtagagacattattaggattttcactagttacactatatccaagaccttaccttggcttcaagtttagttctagatgtctcaggtgtgatcaaactatattaagaaggctaacttctcattcatcctccatctcaacctctaagaaattctgcatcctacaagtctagagtcaaaatgatagtaagctctggattcagatgggcctcactgagatcatgataaacacacgaatggttctggtttaaaacaattttgaggctgcaaatatcctcatcttcccaaaggattcttattcagactaaaccccatttattcttcccttggatgatttagaaccttgtcgtagtgatgtacaaatttacatctccattacattaaggatctaccatcaaaactttcaggcgtgagggctcttgtagtaccaatgaactgaattaagttccctgaatctttctaactttgtcctttaaaaatttaaggactcttaaatgctgtaccctttcatcagcccatatatccccaactacaaacacctatataggaaatgttaggtatatacaggttggaagaactggaacttcaaagataattttagcaaaccgcagaatatcagaaacctaaaagcaaataaatagcatggagctatcaaggagagcccaacaaatagataaattagtgcttaaataatggaaagtaattttgtttaaaaagtgacttagccatgtttctcctcaatctctttacaaatagagactgtgcaaaggctactgatggtgattgcaacatcactctccactctcagtcaatcacaaattataagtagaggtctcaggtcactttcctattaaagataaatgggaaggctggcagggaagagaaaaagataactactaaaggctgtgtgacagcagattaacagcctgcctctgtgaatttccatgcattgatcttatatcaaaaagaaggcaaataaagtgctctgatatggacaatgttgttttttccttcagacaagaacatttattctatgtatatgcataaaataaaaatttgaggttaataaataagcactttgcttgtataatgaaggatttttgaaaagcaactgtaaatatccagttatatgtataataacaaaggaatagctgagctattccagggtcttatctgtttaaaaacaaaagtcaaattagtgctcatcttcccaggcagaaaaagcaagtctgaaaaacaaaaggatgttctgtcaaaaaataaaaacatcctgcagagaatttagtaacagtaagatgaggatgacacaaaggagttccagggatgtcaaagagtaaaatgctacatccaaaatttggtaagaaccataatgataatgcaaaagaaaaagaagaagaaaagaaattatgacataaattgttcaaaagtgaacctctgtaaaaaaggcattctcatacaatgtaggtgagaccactattttgaagggaatttgataatgtatatcacgagatttcatagaaggttacacccattaatttcataattcctcttctgagagacaaaatccagagtgatagcctgacatttagagccacttttctcctcaaaacagctgccaattttgaaagccgcaactaagagactgagaagttagaggtttttctcaagattcgtatgactgggtgaataaaagttggcatttagggcctataaaaaaaatggagggtcacttgaggctttcagttgaaacttcaaggaaagatggaagagtaagtctatatgcaaaacagaccagtacagtgtccaattatttcacatttaatttaaagtgatttgttcccaacttagatgcctaccagaagcaaaagtaaatcttgagtgaaaaaatatacagaaccttaaattatctctgcagttttttctctgtaatactaggcactaaacaaaaacaaacaaacaaaaaaaacaacgtatacaaaagataagagttgaccaaacaccaagattaaaagtggacaccaggaacaggtggataaggtccagacattgtagtcttctgaccaggatttcaaactaacaatgactaaaatattcaagtaattaaatgataagataaaaattttaacataaacctgggaactaaaagaatcataaacaagttctagaagtaaaaaaaatccagtaacggaaattaatatttcagtaggtgggtttaacattacatttgatatagcagaagagagaatcactgaactggaatattctcagaagtaaatatctagactgaatcacagatagcaaggttataaataagtataagagacaaataaggcaagattttgttttaatctacttctaattaaagtcactgaaggagaagaaagattgaggtagaatggtattgatggaaacacagaagaagattttcccagactaatgaaagacatcaagccaaatattcaaaaagcactaccaacatctagcaggctaaaagaaaacaagccagcaaacaaaccaggtacattgtttaaaaaaaacaaaaacaaaaacactttttaaaacagaagacacaaaaaaagtcttaaagtcagccagagaaaaaggacatttaccttcaaagaaacaacaaaaatattggctggcagttggtttatcaacagaaaaatagaataacgagacactagactaaatatccaatgaaaacattgggactgaaactgcaggccaacagggcaacatttctgacaaactgactctaaaaatcacaagaaatatatattagtgtcctattgctgccataacaaattaccaccaacttagtgacttaaaataacatgaatagcacccacttattaacacatagttctctaggccataaatctgggttgtctcagctgatttcttaagagtcttacaaggtcaaagttaagatgttaaataggctcttatctggacactgaaataaatctgcttccatgctctttgaggttgttggccaaattcaattccttgctgtgatagtacttccttactaactgtcagcatgcagtcacccttagcttcaaaaggccactccccagtccttgcagatgggccgctacatctcagaaccagcaacagtgcatcgaatccttctcgtgcttggattctctctgacttccctcccgctgcagctctcttctgcttccagttggagtaaattctctaattttaaggttcatttgattagattaattccacctgaataacctaggctactctccctgtcttaacattcataactttagttatatctgcaaagtcctttttgccatctaacataacatattcacaggatccagagattagagatagacatctttggacagctattttgcttaccacaaagggttaaagtctaaaaagagttaacacaatattggaaaagaaaatgagaggggacttgtccaaccaaaatcaagacttcatctaaaacaatataaattaaaaccatttggcatacacacaggatgaacagctagatcaacggaacagctaggaagccttacaatattcagaaaccggctgtttgactaaggtgacattacaaatcagcagggagatgatggacaatctaattaactaggaaaattagctccttatatgaaatacactctcacacacatatatacatacaaacaaagctgttcaaagcaaattattgaaacgtttaaaagaaaatatgacataagagcagggaaagatttcttatataggacaccaaaagcagaaactataaagaaaaagatggataaattttatcacagtaaaaattttagaaatgtaaactataccataagaaacattatagatgaagtatttttaaagtctcttcttgcagaaaatatgtgcatataattaaatactatgctacgaataccataaataaattataaaaatgtaaattcagaaaagtgaatgaaatgatatgaacatgcagttcatcaaagaggaaaactgagtagccaataagcagcttgtgcaactgcactataatcagggaaaaacaaatttaaatacaatgagattccattttgtacctatgataggaaaataataagaaggctgaaaatttgaagtgtttataaggacatgggaaacaagaagaggaaatagtatgtgtgtgcatggtgagtgaagcctgcagcagcatgaatcatgctcttgcaaggaattctttctggttgcagtttcagcataaggtaggaagtaaggaaaaaggggttaaagaagttgacagataaggtagggctttgtttgagtgctgtgatttttgtgttttctatagaaggaaatggtaagatattgaaggatttccacaaggcaagcagaaataggtttggattgtacaaagattgctctggaagcaaagtggagaatgtttagaagggggtaagactgaggataatagttaggatgttgattcagtgtctcacagaaatgatgagagcgtgataaaggcagcagtcagggatggagaaaagacgtaaatagatgccactaaagaggaagaatcagcagaacctggtcacgaataaggaatgaaggataagaaactgggacagtattggaagtttcaggcttggccaacagagtaaatggtgcaattcactggaatagtttcctagttgggagagtaaatttacaacaggccaaagtgatgagttcagggataccttttgagatcttgtggtcagttgtttctgtggatctgaagctcagtaggaaggtctaggcaaaagatttagttttagcagtcatgagtgtattaatggttagtaaacactgttcatggataacatcacctataaggataaatgagggaaataaaagagggctaagaacagaatcccagggatcaacatctgggagatgcgtgaaggggctgggtgaaataagaaaaaggggctgaaaagtaacaaaactgatagaggcaaaacagttgacttcaagaaacaaagggaagagtttccaaaaagaggccaatactgaggagacatgaagatatagactaacagttgccactcaatttaccgattgtgaagggcattggtcatctgggtctccagcagaggcaggtggttgtgaagtaaataagaggtgattaattagtgacatagccttttccaaaagctaggttgtgatggcagtaggaattgtaagctggagaaggactcttctcttttttcttttttaaggtggtagcccctcaaggatatgtacctatttgggggaaataggtagtccagagggagaagttggtgttaaaggagaaaggaaggacaatgagggtactgagttgctgaagcatcaggaggagttggtgaccagagggcttcactgcagatggaagaaggggcctcttccatggaaatggggtgggctatggagaagaggtgggctcagctgtaggcgagtctgtttctaagtgtgaagcagggaaatacactattctctctgatggccatgttttcttagtgagataatttgtcaagagtgagaatagagatattgttgaaggatggcagaagttgctgacttggctcatgaagatgacaacttgttgtcaatcagcaagggcccaggtggttggagaccactaagtttttggtagcagcaatctttgtgtgtgcgttttctagcagagttcaaccaccatggtgtgtacagaatttaaacaacctgaatggttaggtcaaacctatttgagattttacttgttgaatgaggcagaaggacaagggttaacatttattgagtgaccttggacatgggaattaatctctctaaacctcagtttttctatttataaaatggggctaaaatactacctgtctgagttgttttaagaattaaatgagataatacagtgttcctcacatttttttagtgtgaccttcaataagaaacatgtagaagtattttaatgagaaatacgtatgttattgtgagaattatatgagttactattagtccacaatgccttcaccaaaatacttggggacttacatatttccaaattcagaattttgacaattttaggaaaggaaattttagaacacatatcatataacaccctgtcagggattacaaaagtatcaaaaatcaaacattaatcttttcacagaaaaatatataaatattcacataaaccatgaacaaagactataaatagcctcacctcagttttggaccaggctttgcttcaaatatgttttaaaaaaatttttttgctttttcagagctttttggattttggaactgtggataagaaattgtggagaactatatacagagataggtagacaaataaatagaaacatagacatagatatacatatatatgtatatatatgtgtgtatatgtgtgtgtgtgtgtgtgtgtgtgtgtgtgtgtgtgtatatatatatatatatatatatatatatatatatatatatagtgttattaagtgcctggcatataagtggtattgttattattattggtacagatatatcttatttccaagatgggggtcctcacttaccaaagtgatttttgatccactaataagttgtgactcacaatctgaaaaatgctgatacataatgatatgtaaatgattagcctggtccctggatcgtacatagaaagctctcaatgcaagttaaaaggtgaaaaacaccatcctatgtttatttaaagtttttacctttcaaaaatcttttaatcacatagttgctatttatcttcagtcactttatcagaaataaagtaaatgatttgtctcttgatctacttttgagagtttcatgtctcaatgattttatcttgaacagtaggaaatttaaactattataattctccacttcctgtggcttttataccttgacacctaaaatactttttaagttttctttattttaagtgaaataggttattttattgcacagataaagaaatagaactaaaaactcaagccatttgtctgaggttacaaaatatactattcctatatagaacttgcccaatagaatatacagtttaagaacaactttcaagcagtttattaatcacttcttaaagtgagtcaaagacacttctatctgaaggcagcttacaatctttgtgttttattttctagttctcttggagatgttgaaatagctgaagtgaatgtcaagggtttgttcgtgaagctcattaactcttcccttgacaaagaaatggcaattggagatcatattctccagcaaaatgtgaatggacaaaccatttctttgtaccgattccttccaaacatcgtaatgcaggcaaattccacagtaacagtgagtataagagtataaatactgtacattagaattgtacaggacaaacttgttgacactgacagtctgtggctcagcactgtctcgttatcactctatctggatctgtacgtaagatgtgattttgttgttggtggttaattaccgcactttgtccatcttctggatgttaattaatacccacagttaaatttccacagctgtcttcaattttgtgtacaatatcttttgtttttataatttaactattaaaatgaaattcttaatttcctgaaaccaagtaaatataaacctgaaaagacaagcaaagagattatttgcttagagaacaggtaattagctcatgcaggaggggtcctctctttctcgttttttcctttaatccctgtagagtagctgtttggtgttgcatagcttgacattgtatatgatatagtcattatattttaaaacctcatctgttcagaaagattatgttggagtaaccctatgacatttacaaaattgtgttcaactccagtggcatttgtcattaacaattttattacaggtgtgggcagcagcatctgaagcaaagcatcaacctccatcagattttctttggaaggaacaagacaagtttagagcaagtcctgattgtataacaatcctgtgcaaaccgaacggtcaagttagtttctggttcttaacaatcgttttttttttttaaatattgtgcttattgagcatatctgtattttttattctttttattttatacaatgtgtctaagtgcataaatgtcagtaaaattgactttatgcctaaaagattattttattatcaggttcttataaatttatttatttatttaatttcagtcgttttgggggagcatgtggtgtttggttacatggataaccatgttgtcaaatggaagagcactcattagttcttaagtggtggtattccatggtacgtatataccacgttttctttatccacttgttgcctgatgggcatttgggctagtttttcatagaatggatagttatccttatgttccccatcctcttagctcacccgatttttttttatccttaaagcttgggaagaaccatcactaaatgccacaacacatcaggcaaatcaacagcattctcttcccaatgtcaaagggcccaagagttacttacaatttggcaaaaataattttgatatctcatattcctaagaagcctcttcaactttcgaagtcaagggaagatttaatttgtgatatttagcctgaagagtgggataaggaaggtactccatacaggtcttttccatttattttttcatttctcaaatatttattgatactcttctctattttacagctatgctaagtactgggaatataacagattaagatctgcaccaaggaactaatattctaatgaaagagcttacagtattaatttgaaatgactatactttactccttataaaattaagggcattagcaatagctttgggtaatttgttcgcagtatttgacaattttatattttcactcaacctttctctcggtataatattagcatacatatatacccatggacacaccaataaggttcaaaggtatttctttttacaacaacaaaaaagtgaatcctttttcaaaatgatttttagatcatttttacatacctgtgatttttcttaccctcagtctaacttactatgtcatataactactaacaaaatatgttaacaagaatctatctctgagtttcttttttgctgcaatataatctatgttgagatggactttccctttaaaatagacttggctaatttcttaagagccatttactgtctttctgcgggaacagttgttgttagatgaggagagcacccatgagatataacttagcagccttcacccactcagctttagatctccttgtgggctcgaactgaattttataatacttctctgatgggaaaaataaggctacacaatctaagttatttacttagattaattttcattgatggagaaaatgaggatacacaatgtgagttatttactcagcctcataagaaatcattagcaaaacccagtttaggattaagacattcttatctcagaactttcatcatagttatccactctgtaaaccagtttgtgatttctactttgtatgtgcattgctccaggcactgagcattgaaccagacagaccaggtccctgagctcctggaatgcagattttaaaaagttttcatttcttgcaactgaattaggctttgtacttagactgttccttttacccagtgattttaatgactttgcacatatagaatcagaccatttctgtggggtgatgtaagcacaagtaactgtgcctgctaatgaaagactaaacctgactgattgatccatacggaaaatatttaaatatatttcgtatctgtcaggaatggcgctaggtgctagaaaaaagaacataaatattgcacacttcttgtcctcaagaaactcagagtctgctagtagaaactgatatgtaataataagtaattgcaatacagtgaaacaatgctttaataaaatatgggcagcccaggtcagaaatatcaactctgtaaaggagagcatgagaaaaagcattgagaggaagagccatgtgttatgaatctgtagtggagaggagtttgcccacctaacttgaaccatggtgatcttgcccattttcaccttctggactctcctctctccatgcttcttcatgcactctgctctagccacactgccctacttctcatactacttttgctttccagtgcttgactgctccttcatgccacagggcctttgcgcatgctcttgcctctcaatagactctcttccctccctttttacctattaaatcctacctgcccttcagaactcagctcaagcttttttttttttttttttttacctgagtcacatcccattggaaattctaccttatggtaaagccatatgcattatttaattcgactagaaagtatttcccttaaataggtggaaatgtgactttaaaatcagcttgaaaccctaatgtaagtatagagttccttttctaataaattcattttcattctcactttcatagcactggatattactatctgcaaccgccaggtaaattttccttaaaaagacaatttactgccttctcatagacatgctgaaacacgaactcaaagtgtcatcatgaccctggaattgctttctatttgtatgtagaaaataatccatatcttgtggaaaaagtcacaaagcctgtaatctactgtctaaaataatagccagctatacagatcagaatagaacctgtttctggacttgaataatattttatatttgtaagatggggcaaagagaagttatattatgggtcatttttaaaaagaagcctaggccggcgcagtggcttatgcctgtaatcccagcactttgggaggccgaggcgggcggatcacaaggtcaggagtttgataccagcctggccaacatggtgaaaccccatctctactaaaaatacaaacattagctgggtgtggtggtgcccgcctgtagtcccagctactagggaggctgagacaggagaattgcttgaacctgggaggcggaggttgcagtgagccaagattgcaccactgcactccagcctgggcgaagagtaagactctgtctcgaaaaaaaataaaaataaaaacaaatttaaaaaattaaaaggaggctaaaataaagtatgtcttagactgctttttgagtcatcttgtcactaacatggcagtggttaatattcgatacagctacaaatcttatggcttaatataaaagtggcttttagttttgctttgccatgtattaactacataattgttattctactttcccatctgtaaagtaagagactgtataatataatcactaagattccatgagtctatggacctttaaagcagggacaggttttcagcctctaaattacatgtcaaataattaataaatgtctcatgtttatcaatgcctggtactttcccaatacattgttttgcattagacatccagatgtggaacagaccagtcctatacaataggaactcattgaagggctgtttatatatgccttattacagttgattctcagtaatgtttcagtatcttggggaaaaaaaatggggcttggaaagttaaatggcttgcttaaggtcacatgataagtaatgtgatagaactaaaataaaaccatatcttctaactctcaataatttttctattgcactaaaaatagtttgtaagtttcatgtggccgacattctagagctgaggctaaattttatcacattatcatcattgtcatcgaaaattctctcaagttcctacaatacaggggaaaataaaatattgccttgtctaggaaaggcacacacctcaataagggagatcacactaaaaagatcatgaacatattttcaaaatataatatgtttgagctactaaaaagggaggattcgtaactaatgatctgtagcaaaagtccatttttttgccataatctatgaaaataaactttttaaaaaagaattcatcttctttctctgctagaagcttagcctagctgaactgaccttgtgttgtctttatgtctatgttatttgtcaagccaagcagagggatgttcaaaggttacagtgtgaagtccaaacctctaatttggtaaactaaaaacagatcactagaacaagtagaatgttagggcacgtttttcatgttgaatagaaatataactgttagtgtctatacaggattttcctgaataatttttgcacgtgtatgttgtgcacatgtcacatattcaggaaatccaaacaaactccagcttcagtgcttatgggtctccttaatactctcacctaggattctagcctgaagaacgtgttttcttgtccatgtctctagctctactgtccattttcccatctcagataagatacactcacacacacagtgtcttaaatgtttaaaatcttaactttttcatgttaccattactttttgctcggttctttagagttgtgaaattcaatagctggatgaattttacaacacttcaataaagcagttcccaataccaccctctcagttttacacatgaagtcacagttcaagttagaaagtaacttacctacctgagattatgctgcttgtaattttcagaacaggaaactaaggccaagatgcgttactctgtatcctcatcatgtagttcgctaagccgcacacacaggtaaatggcattatatagttcagtttttaaattctgttgtaccatattttacatggtaaataaaaaacaactcaaaatggctaaaagacctaaacgtaagacctgaaaccataatactgctgggaaagaacataggggaaaagctccttgacgtggtcctttgcaatgatttcttggtatcacaccaaagctcaggctacaaaaacaaaaataaataaaagtgggcatggagtatgtcaagctaaaaagcttctgcacagcaaaggaaacaattaacaaaataaaatagcaccctaccgactgggaaaaaaaaagtttgcaaacctcatatctgagaaggagctaatactcaaaatctatgaggaactcttacaactcaatagcagaaaagcaaataacctgatttagaaaacaggcaaaagacctgaatagacatttctccaaagacatttaaaaaatggccaacagatatattaaaagatgctcaacatcactaagcatcaaataaaagcaaattaaaatcgttatgagctatcacttcacacttcataaggatggttattccaaaaaagacaagagatataataacaaatgttggtgagagtatggagaaaagggaaccccagtacatggttggcaggaatgtagattggtgcagcctttatggaaaacaatatggaagtccctaaagaaattaaaagtagagctaccatacaacccagcaatccctcttctgggtacatacccaaaaaagatgaaatcaccaccttggaaaggtatctgcacagccatcttcattgcagcattattcacaatagccaagatatggaaacaacctaagtgtctgtcaacagacaaatggataaagaaaatgtagctatacacaatggaatattattcagccttaagaaagaacatggaggtacctggaggacattatgctgagtgaaataagtcagacacagaaagaaaaatgttgcatgatctcacttatatgtggaatttttgaaaaggtcaaacatacagagaaagagaataaaactggttcacagggatgggagcaggggaggaaataggcagatgtaggtcaaaggatataaagtagcagagatttgtaggatgaagtctagggatctagtgtacaatataaggactatagttaatgaaattgtgttggggatttttgttaagtagattttagctgctcttgtcataaaaaagtaactacgtgagacaataaataccttaatttgctccaccatagtaaccattttactatatatatatatatatatatatatatatatatctcataacagcatgttgtaaacctcaaatatacatagccaacattaataaatcattttcattaggccattgcgtggtacacccctatccactggaagcaagcgtgggaaaaattagatgctgacgttgaatttaacagatgttcagtagtatctccaacattccgaaagcgtgtgtttcagtggacagcatctacagctacaataactaaagaaaaacaagatcaacctaagaaagatatctcaaattatcaggtggaacaagctcaagttcttcttaagaggtaagggttgtttggtttgtttgttttaatgggtccttcccacaattagtaactaagcatgtgggaacgactagatgacaaatggatgtgtgatgtataaattaaatcaatagtgatttttggaaactactattttgaatagaactcataggaaaagcacgaaaacagaatgagcaggtaaatactcatagggcaatgaaggctggcgatcttcactaggtagtattgagacccctctggccatttcactttttttttttttttttttttgagacagagtctcgctctgtcacccaggctggagtgcagtggcgcgatctcggctcactgcaggctccgccccgccggttcacgccattctgctgccttagcctcatgagtagctgggactacaggcgcccaccaccacgcccggctaattttttttgtatttttagtagagacagggtttcaccgtgttagccaggatggtctcgatctcctgaccttgtgatccacccgccttggcctcccaaagtgctgggattacaggcgtgagccacggcggccggccgccatttcacttttcaggggcactgttattagaggcaaggctgctgcagagaggtgaaaaggtgaggtatccccaagtctttagcagtgcttaggtggagggagaggtgcattatccaggaattttatcttggatcaaaagctgcctatggacagaggtgcagaatatattattcatttgtagcaaatgcttctgaagttataataaaagttctgcccacaaagtttaaaaagtcatattctcttggttttgaaatatgcttcccctttaattgtgccttcaacattaacaccacagcataaaatggcttttgagttccatttaggcttttttcttttacagagagaaggaaatcccaccaaccgttttccctaatcgcagcccttggtgccagaatccctatgtctctgcacatccttactgtcctctgattgaaccacacaatacatccaccgctggaggcagattggatagacagcccaggtctcggtcaaccagacctaatcgagcctcaggtcagttaaaagagtgcttgttccagtggagagtgcgtgtgtgtgcatgcacatgtgttaactagtgggttaagtggttaaaatgtgctaagtgttaaagatgattcatattctcaagaatagatggctcttaaaggaagtattgttaaccattcacttacatttcccctagcacagtgtcttccactgtgctagataaacatctgtctttgataaatatctgttgaatgaatcaatgaattaaaagaacagcgtggccagcaagagtatgtatgattcttgaagttcaatgaaaaacactttttgttttttcatcaggcagcaaaaactgttcttacaagttatgctgtgttgaaaaaaattccaccttttccaaacacactctaatgttaatccccaattctttctccttcagaagtttcttaagtccgctaaataaagcttttagagttagtatgattaacacacactctgtgaatggattttaggaaatccatgcacttgctacatttttcacaaaattgtgtgtgtctatatgattttttctggggagagagtccatgaagttcatcagatgtccacaagtatttaacaagaactggagtagaagaacataaagccaagaaggaaccagactcaactattggagaaagcctgtttaatacaccagcaatatcctggtgaagttgtaatgattcacaaactttgacttaggaaagaagagcttgttttttaaaaaatgaaatcttaagcgagatcccaatatataaaatgcataaaaacagatccacccaaggtgaggaggatgtagcaatttccactgctcatgacccccttattcttccatttctctttgcctgtgatctttaagacaccacgaaatcacaagattctccatgaaacaatatgacaaccattgtgttaatatgctagcacatcactgggaaatggcacccccaaaatagtaccttttagaagtggaatgatggaaattttgtaaatcactgaatatatttctttttctttctttttttttcctgcttagaattcttttattattattattattattcttacactttaagttttagggtacatgtgcacaatgtgcaggttagttacatatgtatacatgtgccatgctggtgtgctgcacccattaacttgtcatttagcattaggtatatctcctaaaactatccctcccccctccccccacccctatttctccacatcctctccagcacctgttgtttcctgactttttaatgattgccattctaactggtgtgagatggtatctcattgtggttttaatttgcatttctctgatggccagtgatggtgagcattttttcatgtgttttttggctgcataaatgtcttctttagagaagtatctgttcatgtcctttgcccactttttgatggcattgtttgtttttttcttgtaaatttgtttgagttcattgtagattctggatattagccctttgtcagatgagtaggttgcaaaaattttctcccattttgtaggttgcctgttcactctgatggtagtttcttttgctgtgcagaagctctttagtttatatttctttttcataaaattgtgtaccatgtagctctatgtctgagtttcctcatctgtaaagatatggttctgaaattgaaggtctctttagcaataaactctgtgcatgtgtgtgaactttagatatagatatagatatattagatagatgtaagcaactttagccctttataatctttagtactttatgacttaaatttgaggctttcaagaaatacattaatttatgtttttctttaattaatgatcatcttcactagtttacttattcagaacaacttattttccagactaatttgatttcaaaatttttgaggcacttttctataatatgatggtggcaactcatcttgattattcaataacatttgctattcaacacaaagcacttcaccgtatgtgcatattttgtagtagtaattcaaaaatagttgctttgatacctctacagtctttatacattgttacataacttttttttccattcacttaattttcagtatgaacagatatacatcagaattgtacgattttttctttgatttctactacaaaagatggccacaaagaaacagatgttatgaatgattggttgctgattgattgaatcaagtaatccctgaattaccagttcatctccttgaaaggatttgtaacatgattcttcaagggaaagttacatggtttgttaattatccactatctttttaatttgcctgctactggaaaatttgccaccattagcacacacttaatagctggcaaagaaaaaaaacagacaaaacaaaaagtaattatacttggaagttgtttaatcctgctccatttaccctaaaataataaataggctagtttgctgagttacagaagaatcttagatagaaagaaatctatcttctatctgaaaatggttgccttgttttaaactgtgtctctcaaatatgccacagaggaggctagagactaataaataggataattttaaagaaacatctacacactgtatttccaacttatgctgaacacattttgtttttaaaaacatgttaaaatacagcaagtataatgttaaaagcacccatatattaatcatgcagaatgaatgcatgttaatattttattgtattgtttcacattaccaaaaagaaaaattcataaatttgaagttccctttaattgtatttgcagttctgatctgatattggaataaatcattctggttctcattttatactttgtttacatgcatatggatccatacatatatatttaaaataatttgtgtgtttttaatttacataaatggcatcatgctaaatgtgccagctctttttgacttactgtaatttgggggatttaactatagtaatatagagagacctaattcagtcactttaaccattatgtagtattttattatacaaatttactgtatcttgtttattcccctattaatgtttttctcgtcaataatgtagatgaaaaaatttttaaatattttaattttcttttttacttaaaaaaaaaatttaccaagtctttgaatgcatccaagaaaatgttatgtctacggcaatgattatccttgtgcaagtctacttgtgcatacatacaaaggttcctttggggttcatacctaaacttttaaaatcttctaaaattcctacatgtacttattcagttgtatggtacctgtatcttcaactttattagattttgctcaactgctctaggaagaattttgctaatttatactcccaccaacatagtaaaatatttcccattccccttattctcacctaactttatattgccagaatcttaaattatgtgccaatctgatggacattaactagtaactcattatcttaatgtgaagttcttctttaatagtggtgttgtgcatattttcatatgtaaaaaaataaaaaatctttccctatctcataataattcttataataataaaattatgtgcttatatttattaatttttggggagtatccgttccctcaagcatttatcctctgagttacaaacaatccaattacacccttcaagttagtttaaaatgtacaattaagttattattgactgtagtcaccctattgtactatcaaatagtaggtcttattcattctttctttttttttttgtatccattaaccatccttacctccccgccccgcaaatcccccactacccttcccagcctctggcaaccatccttctactctgtatgtccatgagttcaattgttttactttttagatcctacaaataagtgagaacattgtgtgtttatatttatttatgatagtttttccaatttgctttttgtatatgtctttaatatatttgaagttgtttttatgtatggtatgaaatagtgacctcagatttcttcgatatggaaaaccatttgtctcaacaccagagagtgtgtccatcacgtgcacactgatttctagtaccacctccctcctatgcttgggtctgggtctgtgctccctagactgttctattgatctatcactgtgccaataacactgttcctgttgttattggtacgtaatcattcttttgctctcttcttgctcttccctttcagtgtgatttggcttttcttaaactttttactcctctttacaagaatcatttttatcaagtttcacatagaaaaaccatcttgttggtagtgtgattaaaatggtaagaattttaaaggtcatgttgagagttgatacctttatgatactgagtcatggtatatgaaatcaattgtcagttcattcagatttctttcatggctttcattgatattttctcatttttttccataaaattcttgtatatcgtttgtagatttctcacccaggcaggtgtattgatttgttattattgttgctactgcttttgaaaatgctatctctttctataactttttttcacttttttaaagaagaggaaaattatctttgtatattgcttttgtttcaacaaattttctgaactttttagttttgatagcttgtagtctcatgggtttgtttgcttgtttgtttgcttgcttgtttttgaagcagagtctgactctctcactgtagctggagtgcagtagcacggtatcagctcactgcaacttttgcttccctagttccagtgattctcgtgcctcagcctcccgagtagctgaaatcacaggtgtacgccaccacacccagctaatttttgtatttttagtacagacagggctttgccatgttggccaggctggtctcaaattcctgacctcaagtgttggccctccaaagtgctgggattacaggcatgagccactgtgcctggccacatgggttgttttttcccctctgtattgtgtaattgtgtacaaatgacatcctttctttccaatgcttataaatttatatcgtgttcttgcattattgcattggcaataatgcgagatagttccaatgagcatggccaactttgtcttattcatatttttaatcgggatgcatcttagtggaagatgtgctgaaagtcaccactgagcattcattttgctgagaatttgttcctgtgggaattagcacaaatttgggggaatgttctgaattctacaatgtaggcggttaggaattttattcagtataatacagatcaaatgcacagggcctctagctaagtttgtggctatggattattaaaggattaaatacgatgtgacactcatcctgcccctcggtgttcacaacaaactaaaatgccagaaaccactcatgggcaataaatgtttctgatgttttgggagtcatgagaagaggtttcattaaagcccccccccataaaaaaaaaattgtgagtagattctcctaagaatcctttcaactggccccaagagggattacccttggccccttaccccatgcactaccaaagctcttgccataattgccctctttgtctctttcagaagctctcactcccatagcttcaggagtcaccataccttctaccaaaagcctggtaaggtatcctccccctatcctaagaggaatttgacagcagatgtcaagaggaaacattttcacctccttataaattccactattatttcgacttcacaaataagaatttagtaagtgatggagctagaaaattttccgcttttgaatctttttttaatgttataaaatacgtaaagaacaaaaaagacacttctctacccacttccccaaatgaaaaatattaatacattgtcgtatttgcattaattattttttaaaataagcattacatgtcaaacgtctcctagatttctttttctagtcctagtcctattcccctcctttgctccctaaagcaacatccatgaactagggatattttttctttttgctattgtctcgttttttgctgcttaatgcaaatctaacttcaaattcaaacatttttccactgtcaactgttgaagctcaaaaaactcagctgtagctgcaaatatgtatttcaaacctatataaccaaagcaaatgttgcaaaagacaatactgatttttctaagtatgacagattctgatatttcctactcttttatttcattttaaaatacttgccatgaccttctaaatttatttcataaccaatagagagggaaagatttgctgtttaagaaacattgctttagaaatatttatgaaaagacgagagcaatggaaaaggctcaggggagatagcattggaactaaggtattgaaggtcgaataggagttattcaggttgaaaagagggggggcaaagcattctgagtagaagaaacagtacatattaaaagcacaaggaggcaagaataaactttgggttcagtgaacagacagaaattgtatccgactgaaatataagtagaaattgaggtgttagtccagaaagtttggtaaggactagatgttagaggtatttgtacaccaccatgttagagtttcaactgtattatgaaaatactgaggaggcaacaattggattttaaataggtgttatagttaatagttaatagttatagttaatagtctcatatagttagatctgtgtttaaaagagaattttaaaagcaatgtgaaaaatgaaatggagtaggaaagattccaaactctttatctccagcccaacattctattctgaacttctgatttatgaggctaattacttataatctctagttggatgccctacaagtgtctcattctcagaatgttcagaacaactcatcattgtctttccttcaaagtctgtcattccactgattttccttatataagtgaatgccattcagaaacctgaggtatcctaacggtctttctctactccttttccttcctcaactcccaagtataatcaatcttgtttaggtatcctaaacatttcttctcttacttaaaaatcttcattttctccccattgccctcatggtggagtccaaatccataaaattgtttaagtatctttgagccagggctgtcctatctcatcacacattctccttcttgcattctatgctttaatcatcttgaagttctttcagttcttcaaacacaccctgactacctccaggccttcacacattctttcacccctcctcttttcatggataattctttttcatccttaaagtttcacttatatgtcactatctccaaagaacccctctctggtccccaccaaatgagttttttgctcctaatatgtgttctcagtaatatcttacactcaccaagcaaagcatttattgcactgtattgtaaattctcttttatctctggactataagtgttaaattgcttttattttgcttgtctttttgtcacttgcaccaaactcagtacatgacacataggagttaatatgtgtatactgaaggacagactgaaaaagagacaccgaagatttttaaatgacatctcatagagttagactggtattttaatgagaattttagaaggaatataaaaaataaaatggaatacaaaatatccccaaatctagaaaaaaataagcagtaaggaagcaaaggataaggaaagaaaggaacaacaaaaaaagattagagagaaagactgagcacaagtaagtctagtagagttgtaatttgaatcccaaaaggagatgatggagaggttgggacagaaacaatatttaaataaataatggcaaaaattctcaaaaactgatacaaagacatcaagccatagaattaagaataataataaatcccaagcagcataaatacaaaggaaaccacatctatgtacatcataataaaacttcagaaaacaaaatatggaagtcataagataatggaatgatagcctcaatgtgctagcagaacttctaatcctgagttctatattgaggaaaaatataactgaaagggtgaaggtaaaataaggacattttctgacaaaaaaaaaaaactggaaggattcattaatggcaaatccacactaaggaaatacttcaaatagaaagaaaattatcccacatgaatgcgcagagctatagagagaagtaaaaaaaaattggaaacaatcaaaacatgaacaaacataaatgtttactacacaaaataataccgatgttgtcttacagggttttaaatttagatagaatttaaatacatgacaactgtatagtttcctagggagggctaccttcacaaagcaccacaaacttgatgtcttaaaacaatagaaatttattctctcacaatactgaggcagaagtctaaaagcaaggtgttggcaaggccatgctcactttgaagactttagaaaattatctttccttgcatcttcttagtttctagtcattgccggcattccttgatactccttggcttgttgatccatcgctgtaatttctgcctctgtcttcatatggccttaacttcctgtgtgtctgtgtccaatttctctcttctttataagaatgtcagtcactgggttagggcctatactaatccaccaggacctcatcttaattttattacatctccgaataccctatgtccaaataaagtcatgttcgcacgttccaagggttaggacacatcttttagggagacacaattcaatccattacaacagaaatagaacaaaagttgggagaggactaaatggagttaaagttctctaaattttctgtttttccaataggttgtaaaaatagcaacttatattagattttaataaatcaaaaatacatgttgtaatataggatggaaactaaaagaatagtagaagaatgtcggcctggcacagtggctcatgccagtaatcccagcactttgggaggccgaggcaggcagatcacctgaggtcaggagttcgagaccagcctggccaacatggtgaaaccccatctctactaaaaatacaaaaattagctgagcatggtggtgtgcacctgtaatcccagctactctggaggctgaggcaggagaatcgcttgaacctgggaggcggaggttgcagtgagccgagatcacgccattgcactccagcctggacgacaagagtgaaactctgtctcaaaaaacaaaaagatatatgtcatactttcattataattcagttaaacatatataatttccaacgtaatatcttctttgatacatgggatatttagggataatatatcaccaagaaattgggtttatttcaggaatgcaaggctggttataaagaggaaaattatataatcacctcaataataaaagcatttgataaaatattcactccatacccacaagagaaccttagaatattaggactagaaagaattttcttaatctgacgaatgatatttgcaaaactcctaaagcaaacgatatcatacttaacggtgaagtaggtgcagtggcgaaagatttttccttgaggtcctgagcaagacaagaattctctttatgatgacttctattcaacattgtactagaagtctgcgtgaaataaggcaagaaaaatgaatatacacatactaattaccccataaaccagcaatttcattcccaagaactatatatatttaacaaatatatacatatgtgcaccaaaatatacatacaataatggtctgagtgactgtatttgtagtagccaagaactagaagcaatccaggtgttcatcaattatttaatggataaataaattatactgtgttcatacaatcccataggcaatgaaaatgaatgaactactgctacatgcaataatatcagtgaatctcataagcatactattgaacaagaaatgtcagacaaaaaggaatgtgtattgaatgatttttgcgtatataaaattcaaaaacatacaatattgaaccatggtgtcaaaggtcagaataatcgttatctttgggagaagaaaggagtaatatttagaggttaccaaaaatgcttctagaacactgacatgttccatttcttgatccaagtggtgtttacaagtatgttttactggcttcaccatgctgtaaattatgatttgtgaactttccttcatgtatattaatacttaaatacattttattttaaaaaacttaacaataaaaactggtaagggaagaaagcatggttccattaatgagcatggacagcttatatactgacaaggagggacaaagaaaatctaaaaaaaaaaacacgttgatgaactcaaaatgaatattaataacatgaagcttattcagtgtaagagaaaaacagtcttaaccattaataagcttaaacccatcattatgttgcagtgtcttgggaattaattttaatatagtttgtcatagctcagtcatttccagaaatacctcatagcagagaaagctaattgcagcccttaaaatattcttcctttatacacaagattcacaggtccagggaaatttagacacatggccatcaataataagaactgtttttctcagcctctgctgcaaatagtaggattatgtgtcaacatcctatataatggaatgtgaacagaacttgtatctacaacatctggatcatgccctgggagtgtgtgctcccctgtgccttctctatggcatgaccatggggctagagctgccacatttcaactgagagatgaagccatgagctgaggatggaagagccacccaaagtgccctgtactggcacatgtccagactgttaaatgagagagaaatacttttgtttatgccatttttaagttggatctgtgtctgagccagatggcccatagaattaagctaccatttcaagatttagtttcccttaataggctattggttaaaaagaaaacaaaaatcacagccagaacagacattttttaagataattaggtgaatttgaatacagaatgaatattagacattgagtcattgtgcttttcttaggtgtgttaattgtgttgtggttatgttagttgttcttaggagattcatactgaaatcttactctctaatggtctggtcatgtaggcatatatagatataatgtgtctgggcacagtagctcacacctgtaatcccagcactttgggaggccgaggtgggtgcatcacttaaggtcaggagtttgagaccagcctggccaacatggtgaaaccctgtctctactaaaaatacaaaattagcaaggtgtggagcatgcctgtaatcccagctactcgggaggccgaggcacaagaattgcttgaacccgggaggtggaggttgcagtgagccaagatcgcatcattacactccagcctgggcaacaacagcaaaactccatttcaaaaaataaataaataaataagataatgcaaatttggcaaatattaatgattaaatctgggtgataagtatacaaatttggttatattattcattaacattttctgtatgtttaaatttttcacaataaaaatttgaaatagtaaaataaataagaccaattttttgatagaatctagtatgtaccaggagctgttagagcacaaaggcaaggccctgagtacagcacgaaggagtcgtcagaatgaaggctaacggccctttaacacagcagataagtttacattgtgttgccattattcatcctacacctagagagaatgtgctttcttcttgctctgattagcttgtagattatcgacaattttgccagcgttcttctgtaattcaagttaaatgacagaaactagtctgaagatagtattttgcattgtttcgagttgatattgtgagcatattcagtttaatgtactttatttgttcatggttgaatgcgctttgcctgtcttctgcaatccatctcatatactgcagtggaattcatcttaattgtggactctgcacctgctactgtcttctatgtaaatgttatcatagtaataataatgatgatgctcctttgtttctgagtgtggcaaagccacactgtgaaaaactaactgctagaaaataaataaaagcagaacatagataaccttacgcaggaatgaaacacttaaaatctcatcaatgtgagctccacattaagatcatatctatagaattttacttaagctggactgtgggctcattataatttaatagatctgacttatctgtcttaggatcaaagtatatttttcccataagaaattgcctccaatacaagtttgagatttttgagtttttccttatatattcctcagattagtgtctgttctgtttattgatgtttgcatgtattgcatggtttaaatttgtcagactaggaatttggaataacatgacgtttctgtgaataggcagagtattagtcaatattatatacatataaacatatatggctaaattagtcaatgacataactagaaattatatgagttaatgtataaaaaatgttaaatgaaaaaaactgactatccagagggatagaaaaaactcattactgtattggaccacttatcatcagactgagtagaaaacaataatttgaaggaacattgcaaaatactaacgggtcctgtgcatattctattatcaaataatttttccaaaagaaacttttatataaaggaaaattttactgcatcgtatattcaaaagtaataatttttctcttcccttgcttactttcagaaaatttagattaaaaagtcaccatatttctgcaggactttttaaaaaaagaatagacaagtaagaacagtttatgtgctgcttcttacaattgaaataaacgtttctttaatggctgaataatgaattccaaggtattagtcttagtaacagaataattaggtaacattatgaccagatattttatttcaaaacatttcaatattacaaaacaagtgttttaaattgtcctttagttatgaaagattgtaaccttctttacagaaatagatgtccatttctttacacaagtaaaaaatatgatttcagaaattcaggggatttagattaaagttactaggtgctaaatgcttgaggctcaaaaaaaaacccaaaattgccattacccactgacatggaaacagacagacaccaccactactgacagtcctgtcattcaatttcaaaaacttgtagatgggaattttctacagatgtttgtagctctaaaatatagagtacaccatttcttgaggataaactttcagggtacaattgaaaacctttgttcttagattagtcagtctggaaggacatacataaaatatttacaaggtctatttcatgccaacaaactgctctagaagattagccagagtcttcttatatctaagccactgcttatagtaaggaaaatatcttagaagcctatttatattctaggttcataacttactatttagcaagtttatactgtgatgtgccaaacagcatcctgattctttagattcagaatcctatttgtggctaagaaaattaccgtgataatcagaaacactcttcatttttgttaatcttccttgtagatcacattttcacttccagctttggatattgtttctctgtaataaaataccagcaatttaacttgataattcttctgagcttgcatggaaaaagaaaggcttaggtatgactgaggatattttcctgttttattttgtttttttccaaaggagctcattatcgtctacacctaggatattatttcgttttcttctcttttgttttacaggaataaaaataacactcatctttggtctagaagtaatttgtacttggtatcattcaattcaacactattttagtttgatacacttgcttcatatctggaaattatatttaaacaaagtgactttcaattcctgcttaagtagatgagagtaaggaaggccaccatatctgtcacctcattcatcaccaggctggagttgactgacatagcaggcgaagcatcatccccttctgtcacatccctcctgatgcagccaattgctggacctccctcccctagctactttgtcgttatggcagttctacatatagaaagcatttgaggaattttacaggctggtaaaattattctgcaaacctccattttaaaaaatatatcttccagatggatattttgtgtcccaaaattttgactaattatgtcctgaaatatatgcttccttttagaatgattcattggaaacttgaacttcataagaatcaaataatacttttcaggtggtttttaaaccactttgttcaagtctcccctaaatactatcctgaagccacaaatttcttcttcaagtgaaagaaaatccttttgttgttagcttattccaggatttgttttaacatggaaaaatcaatacttggaatactggactgaactcttgcccttccctacctagcctctctcctttttttaattattttttttaattttcagggtctaagaaaaagaagacatctgagtcacaaaagcaataagcagtcaactcaacctttaaaggtaagtaactgtattgcaaatttgctttctccacagaaaaataatatgactaaagtaatgggcagaaatgtctttgaaagtcatcagaacatgggttgtccttatatattccatagtcactaattttctgttaaatatttatgttgcctttagagccatcagtttttgtcttcatgttgaatgataagctttctaagaatgggaaattggaaatgtcacatctttactttttgccccatatcctcaatttatccttgttgatggctaagcaatgagcccttgaactccagagtcacttcaaacactcaaaaaacaactctgcaactacaccagtacattttaattcctatgagcaagagagtattaattacatcacagaaatcactctggctaatgagactgcagctgttctcacttgctaaatgatattgtatcatttaatgagtcaattcctatgttgtatcatctctttttcacgatgatatcaactaagtaattgaggaatatctcaacaaagttggttttctgtcttttaagtggttgagtttaaatgcttccctaaatagctaatgacaaggtggtgttttgatgaagattccttttggtttgtgtctttctctagttcacattctttgttgccctcgttcactactggtctatttatatgttttcttgttgttgttgttgttttctgcctaggcttcctattctttacttgacttaagatgaaaactacagccacgtgaaccctaacttgttggtattctggactctcctggtagaaatgacttaattttactactccatacagcctactggctctccgggtttctccagctctcctcatgtatgcacaagcctatcaggttctgtctgattgctcagctgtccagtttctttcagcctgtctctccctagattttccctaattgtcatcttctatttttctgaaagtcaactgctctttgtcaagcccactctctccattcctatagcatcatatccttgaactgccaacttcctgaaaatgtgatagccacaacttctctattcaaagcctccttcacagacatttctaggacattgggactgaaaagggacttatccaaccattttcctttagggcaaaagaaactgcagtctgaagaggttatttaccaaaattaaccagtaattaaccacaaagccagaactaatcccaaggtattttaatggcaagaattgtattactgggagccaagaattcagatttggctcctagtaatatagtccttgctcccggagatcctgagttatgtctacctggtgatcaatttccttcagttgtcataagctttagtagtgtgcaattgaaatgcaaagaatgaggtctgaaatctgcccaggcatttagcaacagcacttccataatttgattatgtttcactccctgtagccagagagaattctactgaatttgcatatgagttggaaaggggacattttattgtatacaaaaaaaaagggggggaattttttatgttttgcttggaaaaaaatgttctgaatcatcccattggatattgaataacaatttggcagaggtttttagccttcgttgatcttcctcggttattattttgcttaactaccacggtaaaagacttgttcattgatcctctctgtggcatattctttggtagctttgattttttaaaaaaatctgcccaccctgttttgaaaagttctgggcctcctaagatgccttacttctgttttctcagagctcccacccccctctggtggtatcttcagagttgatcatcaatgtgcccttcactgtgcccttctgaagccttactgggagcaaaattttacttattcagtttaactgttcatgagtggatgatttatctattgctatcagctcctgagtcggacttgtcagtttgtggaaaattgttcagagatgaggcaattgtttgtttggttcttactggtattcatgagcatccttggcaacctgtaatgctggacatttggatagcatttcatggctttacattatgtcacttgagcctttgaggtaggcagggctgatactatctccagtttatagctaaagaaccttcagatcagagagattaagtgacttgcccaaagtcacttagatagtaagtagcaaagttaagactagaatctcaacatgatgccattgctcttccacaccactctgctaattaacctttaagattgtctttgtcttttttccccactcaaatttgtctgaaagaaagaaacaccacacatttagaagcaggaccagaagaaacattttcattcacaaaaggaggagtgggctaccactgttccaaactgcaagaaagatttaggttctacttctaaaattgctaatttaacagaatgccaattacagagacaaacaagcaatgaaagttcgatctcatggctgggcacagtggctcacacctgtaaacccagcactttgggaggcctaggcaggtggattacttgaggtcaggagttcaaaggcagcctggtcagcatggttgaaaccccatctctactaaaaatacaaaaattagctgggcattgttgcacattcctgtagtcccagctactcgagaggctgaggcaagagaaatgcttgaacccggaaggtggaggctgcagtgagctgagattgcaccactgcactccagcccgggcaacagagtgagcctctgtctcaaaacaacaacaaaaacaaacaaacagacaaaaacaaagttcaatctcgagtttatttgaccactaattacatttctatgcaacaactgattaaaagcatgcaatgtgctcagagtcaggctctcaaatgctctccttactcagtaccttacaaagaatgtgtgggcattctgttgtgtgactaatgaacagtgtctgtgggcgatgccaaagaatgccacagaaacagaacttttcgcaagttaagagaattctggaaaggccaggtaattttcctgtgtggctgccacctgtcgtgtgaacgtttagacttgctaggaaatactgaggattctcaaaaaaagtataaaaatggaagaaagagcaggggaacaaatgggtcttgttacagatcaccagaactgtcctcaagagtatgcaattgcttaggacccatagaaagcaccaacattgcaaacacagcatataaactcacaaccagtaaacgctcttacacataggaggcattcctaataaaagtgctggtgatggagtcttttcatgaactgagctatgttcacatatctcttactgtcctcagtggtctaaactggacagtccaaacatgggatattcttctagccctccaaggagtgttccttgggacctgacaagaagtttttataacagtttctcctggggccactttttgtcaatggggagttggtatttaacccccagagagagggactaatatttaatgctctttaatgtgaaacctgccctaaaggagttttgaaagtctaatagttacattttctgatatcagtgttttctatctctactttgtggcatattccttcaatctctgcactgataatatgtttctcctctcagccccaagctgatctatcaatttccaaaatttttcagtcagttgaaatttcatgaatttttttttcccacaacctccttctttcaaagaagtacactgtgcacttcttgttagttaccctgttcttgttttcccagctttacctttatggtgtcatggtccagttgtatggaagagtaaaaagacctgcaatctaggctccctgccatgctggccaaagacattccacaacttaaagaaaatcaaatgcctgagcaaacgtagcgggttccgctttcatagaggaggcatagaacacaaacatctcaggctgtaatgcctcctactaagacttctacagaaaattcaagcctgctgcacacaggaaaacaaagcttgtttttgtttttttttttttctatcacactttaagtatgttacctggtttctttcaagtctggggcacacctaaaatatttaaaggaaaagataattaggcactactcaagtaccagcaagaagaaaatgaagggtgtgaacatttaaaaatgggtcagtaaactggctgcctccaaacaattttgatccccatattcaaaaccagaagtaaacagtatccatacccagataatgaaatataatagctaagctgcttaggcataaaagagccctgaacatcataaatcaccattaaactgtaaactaaacaagtgcacattacagagttgagttcacagggaaaaaaaaatgaataatcctttcaccttggcaaaagttgagttctcataatttcctcccatggctgggcactgtggctcatgcctgtaatcccaacactttgggaggccgaggtgggagttcaagaccagcctgggaaacatagtgaaactctgtcactacaaaaaaaatttaaaaaacagccgggtgtgttggcacctggctgtagtcccagttacttgagaggctgaggctagaggatcatttgagcccaggaggttaagtctgcagtgagctaggatcatgccactgcactccagcctgtgcagcagagccagaccctgtctgaaaagacaacaaaaaagaatttctttcctgctgttactgtcgtgcatctgtgagtatgatcaagacctgatgattctgggtcttaatttaaggttaatatgaatggaaagactctgaacacctttacttcatattgctataacaactgaagcattccggtcagaattacatttcaccaggcattgccattaatttttttgctcaggacaataatatccaagtctagagaaaatgaagatgcctagcatgttgcaaccaaccttcatcacacaggagaggaagccagcagcaagcaagcaagaaaatagtttcttttagataaaaaaaataattccttaggactttactgtcaccatttctgaaagaaaaagctagagttagtggacaagttaaagtatttgttttctaagcagttgagaaaaaaacattggtcaaaagcaaaaccagcacagtctttattttgttcacatgaagtgcccttgtgacttcagtcttttatatccaacccaactatcaagtctacaacttccacagtttctacagatgcattttccaaaagcatatgtgtcaggaattatgaatcttggagtctgtctgattctctacagttggaatctgtctccttgaagtatggggttaattcagcttcctaatgaaagaatgagttaaatttctacggagtaaccagctgggagtttttaaacctgcctacacttatctaaaatttgccaaaaaagtctcacctttcagcttgtgatacttactatgtgcaaaatcccatggacagaacaggaaatgacaaaggaacaaaaatattttaattaaataatgtaatggagctaccttttaaaaatgccatcctcagtccttattctacagctatcttattctatacctatcaacagtctaaaagtttaaaaaaatgaaatatgccaattattaatgttgaccctatttgtagtgagaaagtatgattgcttcagattctgtgacaatatcctgcctattccttgtagctctatttaaattgattcatgtatatttatatagcatatacaggaagatatggtgcatactttcttggagtttgaggggaaggagagaagtgagaatttttccccaatatcttcttttaaaagattaaaagtaaaataacccaaaaattttatcagtggtgaccatgaagagaaattcattgagttttgttggtttattacacccaagcaccaagagctaaaaatatatttttaaaaatatgccaagggattcaaacatatgcattttttttttttcagatggagtctcactctgttgcccaggctggagtgcagtggtgtgatctccactaactgcagcctccgcctcccaggttcaagtgagtctcctgcgtcagcctcccgagtagctgggattacaggcatccgccaccctgcatggctaatttttgtatttttagtagcaacgaggtttcaccatgttggccaggctggtctcgaattcctgacctcaggtgatctgcctgccttggcctcccaaagtgctgggattacacgcatgagccaccatgcccggcgcaaacatatgcttttgttgcaggacctttccttagtttagctaaagacggggttcttgtctgttccacagccatgaaaatttaggctcgcagatggttaaagggtgagtaaagcagggttttattgggtgaaaggggggttaaatgggagaaacagggatcctctgcaaggccagtcccctgctacagtgcttcccgccggccgttgaaataccaggttccacacaggaagaggaggggccggtctcatcctcgctgcaaagggcaggaacccaaggctccacctcagttgcaggctgattggagtttttccagggaacccctcccacctggctgactcacttttgtactagtgttcatagactattattcacaaaagcccaaaaatagaaacaacacgtgttcatcgacagatgaatgggttttttaaaatctggtgtataatacaatgaaatgttattcagttattaaaaaaatgaagttctaatacatgctacaacgtggataaactttgaaacattatgttaaatgagataagccatacacaaaaggataaatattatgtaatttcacttatctgaataaaaaatgtatagagatggaaagtataacagagtttactaggggctgtgctggaaaggggagaatggaaagctattatttaatgggtatagagtctctgttggggatgatgagaaatattcaggaaatggatagagatgatggttgcacaacattgtgaatgtacttaatgccactgaattgtacactaaaatggttaaaatggtttacaaagtacttctaataaaatatagctagtatttccaagatggaagaaaatcatattctagtctcaagcctctgagaagatatccattgctcaacaaaacaactttacgtatactttctggttatactgcaacataaatattttctagttgctgggccacaccgttgacattatttcctcatttttggacactccggagcagacttgtacattttcagaaaactgtcaataacattttttgccactttgcaccattaagtgttatctttgaatcaggtgttggccaaatcgtgtagactgttccgttttgttcatggttactatggaaactgtgcagtcataatgttttgaggagactagcaggaaatttaagagtgtacaataaaagttaacttatttcatggtttaaaatttcttccagctgtctccatttgtgatgattatcatgttcacattgggagtataaacatacaaccaaaagggctctggtgactatggccaataagccatctcacccctaacagacttccctcccaacctcttttcctcaaagatttgtaataggaacacgtgaaacaagtggtatgtaaggttcaggtgttttcaattatttccctcctatgaacagaggtttcctggatccaaaacatgtttcagctcaaagggttttccttatttttgaagatggtgttatctcaggaaaatttcatctacatatctctgattcattgatcttcatcaataaagcatctccttggagctcttctacacaattatttcctccatgagtagccaaaaatgtggtatatttaagtatttattttgtgaagtgtgctcttagaaagtatataacctttgcccttgcaagaaagagagaaatgaatgctcagcactgggatttgtggtagattccttgtcagttacatcaccacagggcattccagcacaatgcctccactatcttgctgctcaggaactgtctagtaaggcataggtgagggaagatagactcatctctgatggtataaataattaactgcctaaatgttgatgttcatgcaggactattcaggcattataaagaaagaatgtgtttttgcagcattttattttcctaagtttctatgaataaaagctaaaagattgatttttaggtttcaacagccttagatagcaatgggctttatcttatggtgtcagaaatttgccacttcatcatcgccctctgcaagttagcaacagcactctgtttataaatatcttgcaggaattgtgagtgttacttcattaacatttgaatgagtagcattaataatattcattttagggaaacaaattcatctacagatggatgaactagatgaatacaatgaaaaataaatccaaaactttacctactgctttatacccccaaatagataagcattttaaactatcctgcctacacacacacacacacacacacacacacacacacacacacacgtacacactttatgattttggcaggaaatagtaaaagaaaatatgaaatggtaagcactggtcctatgataatgtttttgattaattaccaatgagctttgaagagaaatccaaattctcagataagtatcagggctagagttcttttagagggcaaacttttgctattcttggcccttcctccagtgtctaagtagaggggacattagcacttaaccaatctaagttttacattcgtaataacaatacaactttgcagcaattgttgctcaaagggtacaaagcttcagttaaacaggatgaacaagttctggaaatctattttacaccccagtgacagttaataatgatgtattgtatacttgaaagttgctaaaagagtagatcttatatgtttttgccacgaaacaaatgttaagtatgtgagcataaatgttattttgattgaattaatcatttcacaatatataattaatcatttcacaatgtatacatacctcaaaataccatgttgtacactgtaaatatttactatttttatttttcaatcctatgttaataaagctgggggaaaaaaataatgtgactttgtgcttagacaatatagatggttaccacttaattatgcttatgagagtactgacttaaaatatatctatataaatttattcataatcatattctttggaatacattatggagacaaaccagagacaagtagaaattttgttttatttttgaggttttgctttcctaaacttttacttttcgtaggccaacgatagtttcagtatattcaatgccataagattatcagcctgttatttaaattttacagcaatatgaaaaaatgtaaaacttttggaattgtttgagaatagtattattctgtcctaaataagttatgtatgtatcgggattatggtccggaaaatgaggggaaagtttctctaaataagaagtcaatatgattacgaagtgaccaaattttaccttaatatcaacagattgcaaaggtcagtaataaaactcttctctaccttctatctgcatagcacattgtgttttatattagtcaatgaatagagttcagacagaaggaggaacgtagtcacaggagcataactaccacaagaaatggttttcaagtttatgtcttatgcctcctactatgcagaaaacaaggagcctcctggataggttggggtggggaaggaatccacttccacgactccccattcacatggttggcaaagcggtcctgacagcacattcctgtccacaacgtcctctccttaaggcagctggggcttcctcacacctggtccctaagttccaagggtgagtggcctaagaaacaggaagtgggagctgcctatttcttagggtatggatgcagaaaccaacagcatccctcagacatgttctatttgtcaagcagttacagagcctggattcaaagggagggaatatagaactcacctctctgtagaaggcctgtcaaaggattgtgtgccattttaaacccattattatttgtaaattgccaaccaattactacttttcaacttgatcttgcctttctaaatgcattgggaacgggaatgtctgccccaatcactgacaataaaatatattccaagtccaccccaaattcagttggtggacccattgaatcctgatgtttcaaagaatcagaacaaaggaagagactatggccttttatgttttgggtgggtatattgtgaatttaattgaaacaaggagaatctgtttgaatacttctctgaagcaacaattggttctacagattataaattaactcttaattcctcgcaccacctttgtaggacccctcaacatctttccctcttcgtttagtcactaaaatccagtgggattagctggagatatactgtgaagggcttgtagttttgtttagtttttacctttcaagcttatttttccctgttatgcattgtaatcatcagatattttttgagcatctattatacactaagcatgaaaataatgtgtaagaataatacattgttcatacctttaaagaagtcatagaccagtgggaaagatacttgtaatcaaatatttaaagaatcatagaagtactacaacaaaaccaaatacaaaatcctgagggttctttgaagaacaataattgcagataggtgccaaggagctgattttaagagacaggctagatgtttcaggctaatggagaaaaggaaggctgatcaggacatgcagcaaatacatggaacacactgggcagctttaaggaatggtcatttatgttggtacgtttagaatatggaataaaagaaggaacaaggagatgagtccagaaaagtagattgtgagctttgtattctggggccaagtgtttgaacatgctcccataagttatagaagagaaagagtaatcccagcttctcctttggaatccagcagcatgtaggatagtgagagatgaagatagaatttgttccactataaaatagcggttatttttctaagaaacctcaaccttttcaatcttgctttttatgacttgcttgaaaaaaggtttaccaaagaaaatatggatcatagcatttctagctcacatgtatagatataaaacctaaaaatcattgattgatcaaatacagtgatgacatctagctttggcttcagagtaaatgtctgcctttgttatcagcatagacttcttaaaattcttctctcctttatcatctactatctgaatgaacaaagcataaaatattcgtgacaagtttttttcccctaaaaattcagtgttaagccaatatcaatctatacaatgcaactcatgatccctaattaataaattacacattgttccatctccgctatgaaaatatgctatagggaaattgacatgtgcaaggagctgtctcaggaagtaagaaggacatcctttaagagtatcaacctaaattgaaaagttggcttgaattattatgctaagcctatgctataacattttcaggtaaaaacttgatggatattccagtcttaagacttttgaaaaaatgtgttcataagattgactgatatgttcttctaaacttgtcctgctggttttgccaaaatgctgcaccatttagttcacattactgttcaagatcccacaatgactcttactttcccatagtttgaaatctaaagtaaactctaatgtttgctaagttttctggttgatttctggacgtatatctctcccttctgtgtttatttgtgcaatcactgcctcaattagcaccttattttatgtaaattatcaactcccta

SEQ ID NO: 1128 - DNA, 1170 bp, Homo sapiens
atgttgggttcagttgccacaacactgccattgtcatcttcaaattccagtggaatgcctcttggttactatctgtctagtcctcagattagtagagtaactatatcaacaactggacaattgacttctaaagctactgtaggtagctgttccagagtggaaaacagcttggatgccagccccttctcagttccgaagaaacaggatgaatcacccatgattggggatggagaagattatttcctttctttgtttggtgattcaaagaaacttacagcacactcaaactacactcagaaaactttaaaatacttttctatgattcttgaagaagttggccaatttacctccagttctcttggagatgttgaaatagctgaagtgaatgtcaagggtttgttcgtgaagctcattaactcttcccttgacaaagaaatggcaattggagatcatattctccagcaaaatgtgaatggacaaaccatttctttgtaccgattccttccaaacatcgtaatgcaggcaaattccacagtaacagtgtgggcagcagcatctgaagcaaagcatcaacctccatcagattttctttggaaggaacaagacaagtttagagcaagtcctgattgtataacaatcctgtgcaaaccgaacggtcaagccattgcgtggtacacccctatccactggaagcaagcgtgggaaaaattagatgctgacgttgaatttaacagatgttcagtagtatctccaacattccgaaagcgtgtgtttcagtggacagcatctacagctacaataactaaagaaaaacaagatcaacctaagaaagatatctcaaattatcaggtggaacaagctcaagttcttcttaagagagagaaggaaatcccaccaaccgttttccctaatcgcagcccttggtgccagaatccctatgtctctgcacatccttactgtcctctgattgaaccacacaatacatccaccgctggaggcagattggatagacagcccaggtctcggtcaaccagacctaatcgagcctcagaagctctcactcccatagcttcaggagtcaccataccttctaccaaaagcctgagctcccacccccctctggtggtatcttcagagttgatcatcaatgtgcccttcactgtgcccttc

SEQ ID NO: 1129 - protein, 382 aa, Homo sapiens
MLGSVATTLPLSSSNSSGMPLGYYLSSPQISRVTISTTGQLTSKATVGSCSRVENSLDDFSVPKKQDESPMIGDGEDYFLSLFGDSKKLTAHSNYTQKTLKYFSMIEVGQFTSSSLGDVEIAEVNVKGLFVKLINSSLDKEMAIGDHILQQNVNGQTISLYRFLPNIVMQANSTVTVWAAASEAKHQPPSDFLWKEQDKFRDDCITILCKPNGQAIAWYTPIHWKQAWEKLDADVEFNRCSVVSPTFRKRVFQWTASTATITKEKQDQPKKDISNYQVEQAQVLLKREKEIPPTVFPNRSPWCQNPYVSAHPYCPLIEPHNTSTAGGRLDRQPRSRSWNRASEALTPIASGVTIPSTKSLSSHPPLVVSSELIINVPFTVPF

SEQ ID NO: 1130 - DNA, 161703 bp, Mus musculus
  misc_feature (1)...(161703): n = A, C, G or T/U
tgtaaacagagccgggccgggatggtcggcagctggagcgcagtcgctggcggtgaggagggcgggctgcccgggtcggggtcctgccgggggtcggctgcaggccgcaggggagaagggaccagagccgcggtgagcatcctcctcacggcggccttgggcggggagggggacgggatgacgcatccccggagctccccggggtcgccggggttcttcccacgcaccgctttctgttgtatttcgcgctggggatagcacttcatttgtgggtggctaagtgaggaggaagacatgacctggtgtttattttttgtgaatcaagtaacgcaaattagaaagtagttgaataaggtgatcctgtttctgcgttgtttttagtaacccctccccagcgatcatagaaaccaaaccccagtagagcttttagccccagagaaacgctacgtttgttctttctattgactgagcccattttgaatgtatagtaaatgacagtacaggactaatgatagattggtcttgtatgaaaagcttattaagctagaaaacaaaaacaaaacaaacaaaacaagataaggagtcctcaggcccttaagctggaaaaaaaattctgatttcagaagacaaatagaggctgggcttatatgtatagtttgcaaagcaaggcgcctttacaggttaaaaagattgagatatattattgtaaatgttatttagttcctcccctttttttctttgatccatggaactagaaagaaacttctgggtttttcctgtaaaatattttcaacaaatcataataaattgtgacttgtacttatacagcattatagaatagtacacgttataagtggttgcttaaaacaccaagtagtttttatttcatttacttaaagaaataccatagcaaaaatgaggtctttaaaaggtcaatatacatgtgttaccttggtaacataatctaacttcactaggagtcaagtattaggttaaattgacacgaagtgtgtaaatgtcatgtaccaagaaataacatcaataacttgtgtgtttgtctttatagtaagtactttaacaatgctattgttctggcaagatcctgaaagcttacttcagcttaaattcttgtttggtcactttctcatttcgtcatcctggaaagtttactcaatttagctgtttcctaatctgtagaatgggaataatagccacctcatcaaagattcaatgagttattaaatatgtatgttttttttgagagagtctctctatgtaaccctgtttagcctggaaattgctatgtagattaggctggtcttgaattcacagagatccacctgcctctgctggaattaaaggcatgtgccacttgatgtttttaaagcccctggaacagtacctagaataagtgtttgatgagtatatcaaattaaaatattccactactgaaaagcagatgaataattgtcaagtgttcgggaaggcgtggaggggggagttcttttttttgtttgtttgtttgtttgtttttgtttgttttgttttttttttttggtttttcgagacagggtttctctgtatagccctggctgtcctggaactcactttgtagaccaggctggcctcaaagtcagaaatccgcctgcctctgcctcccaagtgctgggattaaaggcgtgtgccaccacgcccggcatgagggggaagttcttgttgaatgggtggacagcaagatgaaagaccagtgggggttgggctgcatgacaatgcttggcttagtggttaccatggtaaattttatgttttgagtattttgccacaattaaaatggctcaggtatcagtgttcacaacattatatgctcagaattctttattgccacacagcagcctcactcacgcttgcctttagtgctgtgacagtacgatggcttgtggtgttttatttggtagattcacgcactggaggtttatcagaaaacctgcaaacacattgttaatttgacacccaagactctgggacaggcatagctccatcacgaccttctgctaactttgtttttgtgttttcctctaatcctcacaaccatcacagaagtcatgtctacctgactatgtatgttatagtacatgacacacttgagattagagtggagaggttgtcaaggtggatctaattgaagagttcccataaaagtgtagagctttctatgactgggaaatcaagaagactcaacatactgtagctgatttgaagatggacgatatcattgctgaggactctaggtagccttgaggaatttggaaggtgtaaaactaccaagagtggccccctggctgacaaccaacaggaagttaccaaaaccaggatttttgtcaacaatccagatgactttgaatttggactatttaccagaatttctagataagagtccagcccacctgagccaacaccttagtgactatgagataagaagtatttttaaaaagcaacttagtgtaaaaatttgttgtgtcataatagaaaagtaaaatagaatctagcagaaaatggacaaaaaacttaagcacactattattatggaatattctcaaggcctctgtgttaaagcctcggtctctttagaggcattttgaaaggatgggacttatgagcactagaagtcaagaggtcaacccaagggggttgtggggctctgggtccttctgttctgtcattttgcttggtgcctcataactgaagggcttttgctctgctgcgcacacggaccctggtgtggccctgccacagtccccaatacaatgggaccagctggtcataaagtgaaagctcagaaactgtgaggcaaaatgaaccctttgcaagctcattactgtgggacttcccatatagccataggagggaactggaatcaaatagctaatatattaacttgagttctttctgttaatcaaaggcgcgaacatggaaacaacaggcaagacttttccagctcccaaagcactctagctctcaaagagctttaattgtcacgtcaagcagtgtgtcatggagcagacgttctcaaatgccacgagaggcagacagtgcagcctttctgaaaaacagtgactgagtgtgtaaaatgtctcagcagtgctcctaccctttgacttagcaattcttcctttagaagtccaaaggaacttgtgagaacagttacgttcatcatgatgctgagtgtgcctttgtaaagaacagactggcaatattatagatgcccagtaacaggggagcagtcacattatggtgccatcaaaagacatgacataatgcaaatatcaaaaagatatttatgaagggttttaacagtggagaggtttcaggcattgctaagtgggggaaagacaatagagaactgtatttgcggtatgctttcttttcctctttcttgtctttttcttctttgttatacagggcttccccccccccacccccgttagagggtaaataagaattgtttattttgcctttattttcaaaacctgaacaatgtgtagtactttttttttataaccatgaagttcaataaatgtttcaaagttgtctacattatagtgaatgcattttgaatctaaaaccctgcactaacaatgagaacaataaattcacaactaatataggtacaaaacagagagaaactttctaaaaacattgaggtagaaaacagaatactgggctggtgtgatggctcagtgggtaagagtacccgactgctcttccaaaggtcgtgttcaagtcccagcaaccacatggtggctcacaaccatccgtaacgagatctgacgccctcatctggtgtgtctgaagacagctacagtgtacttacatataataaataaataaatcttaaaaaaaaaagaaaagaaaacagaatattgcccacacaaggtttctcagtagtgtgatcagtgcagacttctgttggaagagcactcttattccttttttcttattctcttttcctttccttttataattttaattaatttttgtctaagaaatggtctcatgatagagcctaggtaggcctggaacttgtgtagcccaggttagctttggactagtagacttgtttacagccagtctgtcctgaattctcattttatctgagctagtgagcttcctacctgggcctccggagtgctgtgattataggcatgtgttgccgccacatctagctaaaagctcttgttttctttaagatgaatgcgtttagatgttaggttaacaaccctcttcccctcccccttgtttatgtgtacagctaagaaataagggactgaggaatatgtaattatttgacagaaaggaaaaagaagagcttgttattaggaccagaaaaaccaagctagatagaggccagcaccactagctgtaagcagccaaggcttatgagtattgaatatttatttgcagatgcaaggtgatctcagtatgtagccctttcaaaagatttggaatcaggtcctgcatttacatgtttacaaagcaggctgagattgatactattaaactagtttcagaaggtctgatttcaacctagaaaagattagtaatataggcctagtttttagggttcttcttttctagacagttcccaggggcatcaggctatggctgttccttctcttttcccagtgactggccccctcttctgtttcatatcaccctcacctacgccctcagagcagtatcaaaaatgtctgtcttcacagtggctcctggccatttgctggcttgcatcatagcaaatatttactccttggaagaaaagttatagaagaatacctagcaaggaattgctgactttgttttcatttttcgttcagagctggcatggtatatgggttctagaagccacactgtatgctagcttcaagtgattcagaggacttagtaacaagtgcaatgaagtgggtgccagtagcaaagtccatatacgatttgctcctatctcattggtacgtgtaggtaaaaacaaatactaaagaacctcacagcttactttcctgcaaactatgcagtaaaaacatgatttggtcaatgcacatcattaatcttgttggcagatgagttaggagtgaaacaaaactcaaagtgaacagagaggcagtgttattgattgattgattgattgattgttgagatagagtatccctgtgtagtcctcttagttctaggactttcaatgtcccaggctgggcttggattcacagagatcctcctgcttctgcctcccatgttctggcattgaagatgtgcaccactatgcccaactgagaggccattttattgagatgtcaagcatattgcttttattaacatttttgttaatttgagcttggtttcaaattggattccctagttatacacaacattcatgagttaggcaggggcttatttctatctagctatcttgagtagagtaaccagtttataattcagtataaattaaagctgccttgttctgtattatccagtgtacttatagataattagctaattgggaagtggtagacacacactctactatgtggtctgtaggtgtgaagataactttgaacaagatacatagccttgtctttagaaaacctaccgtttgttagggaagacagagaagaaaacaggcctctttaaagtagtgtctgacctgattattgaggcaatcaggactctgtagaggaacataagggcaggttcaaatgggcctaggaagtcaggggaaaacgcagaagtcagcacagacctgaaggcttagacgaggctgctgtggggtggggcactttgggagaaaccatgctggtagaggtttaggatggtggcagtgggggaaaaaaaacacagcttccaggcaaagaaaatagggagattctaattcctgtaaattctttatgaccggagatagaatgggattgtggtaggagtgtccagggaaatttaagaactaagggctggaaggaaagtaatgtgagctcttctgagtaatgtttatccagaaggcagcagggttttgattttagaaagcccacttgggtgatagatttagagaagtctacctggaagatggcttgtggtggtgaatgtactacggaggtagagatactacaatgggaagattttgcagagacaaaggtcatagggcttgctaatttgtattggtcactggtgactcagctagaaatgccagagtggatattcatctttattaggggacaatgtacttagctctgtagcaaatgcttgaaggaggcaagctggagggtaatttgcgcattgtaggaattagggcacatattaaaggcagttacatatgccatctatctcaggagatggagaagttctccatctgccatgtggattgtagctaagccatgaacatagagaagatccttagggaagatgctgcgtaagactacagggtatttatcatctgagcacaggagcaggagcgaggagcagtcataggcaaaggagaaagggcagaggtggcagtggattcatgagtgtcacacagagtggctatttgtaagttgcactcctagtggtcagtcacacctgttggaagatggttcctagacttggccatctagggttggccagtgatctttgcatgtgaagttccatctggtgcagaaccacactgcttcttggagaatgaatggggcggtaaaaagtagagcctgaaagtgtcaaggtcaaaacgtttccagaaacttagattagagagaaaggagggacatgtatcctagatccggacaagcttaggaagcatagagagccttacctacagttcttggtcaggacagcttttcctttttgtttttatttgaagaactttttccatacagtatatttttgatcatattctttcctcctaactgctcccagatcttccttgtctctctgcccacccccatttcaaccttgtgccctcttctctgtctctgtctctctcaatccccaaatcagaagacaacaaaaaacctagtaagataaaaataccaaaaccagacaaacagtgcatagatagcaagcacagtcactttacgttagcgagctactcctgagtgtggggcccgccctggaatgtggtcgaccgacatgcccacggtgctccgctggaggaagctgactttccccttgccggcagctgccagctgcacatagctttttggttagaggtgagattttgtgtccacttccccttctctgtgctgggatttttgtctggtttgaacctgtgaacatcttgtgcacctaccacagtctctgttgtgtctggaaatgtttccttggagtcatccaccactctggctcttacagtcattccaccttttcccccacagatctctgacctggaggggagggattggatgaagacatcccttctagggatgactgcttcaaaatctctccctctctgcctgttgttcagtgggtctctattgatttcactctattacaaatggaggctctgctgtgactgatctgcacctgtctaagctgttctgttaaaccctgcagagagtgcaccactgaaccccgccaggtcaaggccacggagaagcaggtgcagagaagcccctgctgcctttaactctgaagaaggaatgcttgagtactttaagattgatttccttccttccttccttccttccttccttccttccttccttccttccttccttccttccttccttccttccttccttccttcgtttttgtttttcaagacagggtttctctgtgtagccctggctctcctggaactcactctgtagaccaggctggcctcgaactcagaaatccgcctgcctctgcctcccgagtgctgggattaaaggcgtgcgccaccactgcccgactacattaggactttctatccaagcttcctaagcagatcccatcctcattctttctgtagttgctgggtgtataagagaagatcaaagagaaggtagtaatcttttccttggtaatagagacctaagggatcctgtaacctgctttgaggctcataaagaatagcattctgttgtttgatttgcatccccaaaccacctttgaaagtatgacagggatctatatgttgacaaagtagctcaagtgaggctcaagaagattgtccccaatcatattttggggacagtgcatagaaaacatacccagcacttcagctttaaatcttgtagttcaagtaggtccccttcactggaggattatgtgtggtgtctgtctttttgttgtttgagtgtcagtgttaaacataaaactgacgtattagccgggcatggtggcacacacctttaatcccagcactcaggaggcagaggcaggcggatttctgagttcgaggccagtctggtctacaaagttccaggacagccagggctacacagagaaatcctgtcttgaaaaaaaccaaaccaaccaaccaaccaactaaacaaacaaaaaaactgacctattatcttctttgtagatttcaaataaaactgaaagttatcaggcaatcttgttattttgcttgaacttcatatatgcataaggctaactttgaggccgctttaaatggagtctatttttaaaaatgttttaatagttaaaatatgcttgagttatctacagtagcatccagtttgaaagtatttcttttaattctcttggcagaaacatttgtttgcaaatttaagcaaacatttttacaagtgtttctatttattggcacaatgaagtatgatttcttagggaaacaacaagaggtttgggcagttgggactaaacatttttaaaagcacttgtttaagtgaagtcacagttattatgcccttacagacattctgagtaatgtgtccaagctcataatgagacttgaggctagttctttagtagagaacaactttttactctgcttgttcagggatttctcatatactactcccttggaaaatttgcaatgacacagaaagattgtagaagtgattcccatttaatcaaccatttccctgggtataacagttatcaatcaggtaactcccgggtcatgggattaacaagtaatacaaagtaaatattagttacagttgctagtatttgttactgaaattggaaacatcattcatatgaaatattagtgtgttatttagggtcattaattggctttgaattgatatgggactgtgcatttagtgttgattttaatcaggccatattacccaagacaaataacttgatctctttaagtttccatttccttgcaaagtgaaaataataatgatatcagctcctaaataacttgttaggaggatttaaccactcagtattcacaaggagcttcgcataatgtctgccctttaatacgtattaagtgaatatgagctatttataacttgtcattggtctcaagaattagaagaactaggctttacttttcagcgtttgttaagtccatcttccacctttaacctacatccctctgtattgaaaggaacttctacagcatagttttaacttttttttttttccttttttaaaacagggtttctttgtgtagcctttgctgtcttggaacaatctctgtagaccaagctgtcctcaaacttactgagacccactgcctgcctcctgatattaaaggcaggcctcaccactgccaggctctctgcaggacatttgtaaagggtttagtacagtggtgggcaggacattctgatgttgggcagctttttaagtgttagctctcacaggtttatcactcagtaccagatccgatcagccgaatgtcagtcagtcgtatctatagagttgacacaccattgggatttgttgtttatttgttggaatcaggttctgtggagtctgtttgacctcaaacttattacgtatgctgtggaggctggacttaagctcctgttcctctataccacggggcccaccctgcagaattgttttgagaaaacccatttcacattaatggttcataatgcagttaatttaaggggctagggagatggcttattggttacgagtagatactgctcttcctcagagtttaagtgctagtacccatctgagggatctgacgcctctggcctccacaggcacctgcactcacattcatgtacccacacagagcccccaccctccccgacacttaccacaaccacactcacagttacaaataaaaataaatcttaaagaaatagataactcctactactcttagtgcttaaaacttttcctctgccctgtatgacaggcagaggattttctggcctccacattgtctggttaaggtctttctgttgtttgtccttatcttttcttatctttgaagtcaaagagttttgtctgcctttgctggctgtgcttgcttcctgactaaattggttcgaggcagattgatagccaaggtcactgtcagattaagtcctagggagaaaggaggcttgcggatgcagcctgtcactgctgaatatgtagcacttcagataacgagctgtgaagcaagcgccttttcttagacctgatcactggcctggacctcttgggaaaacatttaacaaagacccactcttgaattttagcagattcatatatatcaggaagaaagaaaaataatttagttttctcataatattctttctaagcaccctgaagttggtagcttggtaaagttttctaattgcattttgtatgtttgtgtgtgtgtgtgtgtttatatttgtttcctctctttgtacatgtaattctcatttgactgatctgtgcctggttactaaggacactgtctgtttcccccagttgttaagcccttcaagggtagatctgggctttacacctccacggtctaaagtagcactcgagcacttgacgcatccttttagattttttgagaaatgacataaacattatctgcatctgtgcttcttaactataaggtggtttggggcagacatagcaggattgctgttttacagagaaggcccagaggtcttgtattgaccagcctgacttgctggctgttattcaattgggaatgtgagtgtagcacggagccttttcctggggtccacgggttgtgttgtgctcattactatatttgtcccactgctcgagctgggtggctcagggcttagcttcagactccttacttatggttctgctgctgtggcacctatgagctttaaggtgatttaaaaggttgaatttgggtggccgacaggacttggtaattagacgaggatttcagaacgtctttgtcttcccccatgggacaatagatgagtcatgtgcctctttcatcatagctgaaacaatcctttcacctctgtctgccgagattgttctaagtatttattaaaaggctcaccaagcactttataaaccatagtctaaactctgcgtgtggaaaatgagtattttcagtaaaaccagtaatttcccccacaggttaactgaattttgaagcattacgcaagaaaaaaaaatgaaagaaagaaactccagcttctatttggaaatacttccaaccctatttgtgttcagaagagtctacatagttctatgagctgatgataatctttaggtctgaaggcacttccctagcccttttagggtatgaggcacatttggggctaaacacattgcctctttgttctgttcgttgttgacatatgtcccactttcagccctctgtgattccctattatagttaggggctgatttcagcagcatgggctttggcagttgtggggctgggaattgaacttagggcctggtgcatgctagggaagcatacttaagctgattgtgtagctggactcagtgaggaccacttgggcagtgcctgtatctgctgaggagacccagaaggggaggaagagggtattggctgagactcagtgagcagaaataagagagaagtaaagagtgtattgcccgtgtattagttatattgttgctgtgaccaaatactattaagtgatagaaggaaggaaggagggaaggaaggaaggaaggaaggaaggaaggaaggaaggaggaaggaaggaaggaaggacggactattttagttaattgtttgagagtatggtccattatgagagatgtcatatcagcaggagtgcagaatggctggtcacattgcactttcagccaggaaatagacatgaagtctgacattcctttccccttctttgttttattctctctgggactccagcacctaggatggtgctgcccttattatgggtatattttcctacctctctgtaaatgccatcagactttcctaaattcagttaaattgacagtcaagattaaccaaaccaggggctggagagatgcctcagtgggaaaggtacttgcagccaaatgtcagcatgatgatgacctgaattttattcccagaacccacatggtagaagaaggaagtgactctggtaagttgtctccagacctccacacacactgttgaggcatgtgtggcatgtgtatgaatgcatacacatgtacacacacacacacacacacacacacacacannnnnnnnnnnnnnnnnnnncaccacacacacacacacacacacacacacacacacacacacacacacacaaatacatcttaaaagaatcaataactccaggaaattttgggtgaagcttctagggaggaccaacactctctaggaggatgtggcctttgaaaatcatagcagctaagtaatgaggaggcccctcgcttactgtaggagttccatggcctgtggccttgtgtcaggttggggaataagtagcagacccggtctcctttcctcttcttcctcctctctcctcatctgcttcctctatttcactcatgtttttgggatttgggtttagagaatgtatttaaagagacagtggtacccaagctgtgtatatagtcttgattcctattgcatgtgggatagaacctccctttactattcgtctgctttctctgacttatgatttcatgactgaagtttatttttcatatctgtcagtatgtcccagaatttctataagcatttattactatacaaatactttatatgaacttagttgtaaaagtaacttatttgcctgaagtaattgtcaagaggcttactgctgaataagctcaccctttctagttctttctgaactctggctggctggttcaactcagctgttctggctcaaactccttcccaaactgactgattcaaactggcttctcttggcttctacctgaattgctctgcatggcctcatactaatttggacaatatgctctatcttttggctccttcttattctccagctttagttacctctgctgccctgcactcaactgcatgaactcatgaaggaattcaattccactgcacccatccacccacccactcactcactcactcacccacccactcacctactcacccacccactcacctactcactcactcactcactcactcactcactcactcactcactcactcactcaactgaacagtcactagagctcagaaatctgcatgcctctgtcttctgagtgctgagattaagggcatgcaccatcatgcctggacctaaatttttcttgaaactctatacaggctggtcttgaactcccaagagctgcttgcctctggctcctgggattacagacgtgtcatcccagccaggtcacacagacctagaagggctctggatgggatcccttgccagagcagccatgctgctgttgctggattaaaattcctctacacttagtgctcttctcacagcatagcagtcgttttttattggagtttggatacaatgaggctgtttcatgctcacccaagcctttaaaaatggggctctgcctgagtcaagctgtgtgtctcatctgaaagcctcccagtcccctgacctgctgctgctggcctgtctgttccatcagtgcatttatgttatctttgtgatagagcaccataaaaattgacacacttcctggttcaaaaaggtccttttgctggtcacgttttctggtggctccattacattgtgtaactcagaaaattcccagtcagctccagctttaaccaaaatagagaccatgtgagagccctgagtactgtccaccacccttgtggtcaccctggctctccttttacaaatcgattggcagaagcaggttatctgagctgtctctgcagtgctttgctctttccagtccagcacacattaccttctgacgtcacctggaggaagttagcacctttgtcaggcagctcaggaggtcaggcatccatccatccttctttgtgtaagtctctagtgttattactcatacctgctagggctgccagattccactggttaattatccttgcctagtgagatttcctggtaagaaaatagcaacacagtgactctccatcctgctacatcttgatacatgcataggattctttggtttgagctcttgattaccacattgacaaatgggcctcagtttttcttcctatcttcaatggaaaaactatttccgtttatagaaaaggtattctgtaattggggctggtgagatggctcagctgataagagcacttgctggtcttccagaggactaggctttggttcccagcacctacatgacagctcacaaccatctgtaattccagttccaggcaatctagtatccttccctgcctctttgagtatcagatataaaaatttaaaaacctaaaaaaatcctataattcactgaatttgaaagacaaataaagtagtattaagtagttgattttgatttctgacctggactttttccagggagagattgggaacctgtggttgatgaaggggtaaggtccaatggaagcttcatggaggcttgtgttgttaaaggcatgctggaacatctacctagtgaatgagctacatgcaaagcaatttgatattagtgactttaatggctccaggtagctgagtaaggcacccagagcttaaatgatttgccacaggccacccagcaagtgtgtggttgagccagatttagaacaagagttctaattagctcttgacttccagctttgtgctaagtctcaccactctgcaccgtcacactggagttcacttgtcagaggaagggacactccatgtttgacctatctgcaagtgtttagttaattcaaaaccaaataagataggtctgtaaaaagtattcaatagtagagactgaagtctactcaaagaaagtaaagtgcaaggaaaagacaaattccaaaaaaagtaactctagaaaaggggtcccctaaagataacaatgttttctatgggagggcaagggattgtgctggccatcaagttccttagagcttatgatggaattggagagaatggctggtcactttaacacaatacagtaaaccacggttgtagtgagagcctgtgtaaatgggaaaggttctctagcatagacagaagcagggaggactaaagcagaaggtggtggtgtgggtgatgcagataggccttgaagggctacatgtattcaacatgtatctgagtgtgttcgcgtgcacgtgtgtgtgtgtgtgtgagagagagagagagagagagagagagagagagagagagggaagagagagacgttaatatatttttaaagatttatctaagccatctctccagcccaagacttttatatgcttgagcaaaaatgagcatacattcctgaactcctagagcttattttgatggtgagaagaaaacctaaattaaatcagtaaggaaattaaatgaaaatattaaaatatatcagctatttaaggaaaaaggtgattaaggtttattcagacatggtaggccctggtaatggtacatacttctggcatgacttgatgacagtggcacttccattttgtgttattctttctcaaaacatgtagcttgggtttaatcatgaagaaaatatcagaacaaacaaacaaaagcccacatcagggaggtgaaagatggctcagttggtaaaatgcatgctgtacaagnnnnnnnnnnnnnnnnnnnnactaaagcagaaggtggtggtgtgggtgatgcagataggccttgaaggggctacatgtattcaacatgtatctgagtgcgttcgcgtgcacgtgtgtgtgtgtgtgtgtgtgtgtgtgagagagagagaagagagagagagagagagagagagagagagagagagagagagggaagagagagacgttaatatatttttaaagatttatctaagccatctctccagcccaagacttttatatgcttgagcaaaaatgagcatacattcctgaactcctagagcttattttgatggtgagaagaaaacctaaattaaatcagtaaggaaattaaatgaaaatattaaaatatatcagctatttaaggaaaaaggtgattaaggtttattcagacatggtaggccctggtaatggtacatacttctggcatgacttgatgacagtggcacttccattttgtgttattctttctcaaaacatgtagcttgggtttaatcatgaagaaaatatcagaacaaacaaacaaaagcccacatcagggaggtgaaagatggctcagttggtaaaatgcatgctgtacaagtgcagaggcctgagtctggatcccaagcatctctgtaaggccatagatgtgatccttgtaaacacacacacacacacacacatgcacacacgcatgcctgctgggtttgaaatggtagataacaaaaggaatactggtaatcttaggagcttcatgtaatgtgattggtgtctcttctataaagtgagaatcttatactttatgttcatttaattacattaatttttcttagtctctggcatacaagatgaaattggaaaaaaaaaatcccatttcaaattttagaattactgaaactagtttcagaattcaaaagactgaggcttaactagagactcagaaagaataaacaagcctaaactctgtttgcagctagaaacattggaaacattgtatgacgttctatgcaattcatggtcaaacatatagaagtcgtcaagttcatagttaccacctctttataagagaagctgaccacagtttctatgatctgtatacaccattgatgcagctaaaggacagactttggtctgggggtatggttcagttggtggagtgtttgcttggcatgtacaaagctctgggtttgatccccggcaccacctacaatcaagtgtggtagtgaatgcctaagctgcagtgcttgggaggcgaaggccagggacccagcagtcagggcgttttcagttttagagtggggttgagttgagcttggtaaatagataaggaaagtttgtgtgtattagtttcacttacatatattaaacagcatagtgcagtgctgttgatttaaatatattggtttaatggcctagcagctgaaaattgattagttataaagtttttgaaaaaaaaaaaagcatgtttctctgctttttcagtgatgtattactaattgttagttttacctacttataagcagtaaagaagaaaaaaaaatgttacctaattttattctatcttttgttaaagacacacaggtatatgtgacttgtgggcacctgaaatgcagccagtgtgactgaattgaaatagccatatatggctgctgtttactgtattggattgtgtcatactcaaggtctgctctaattgtacctgactctggaggcctagcattttccagagagagtgggttagtgctcacgtagccttcttcctgttcaggtggcgccatgaggtacctcaggtccagagggaagaagtgatgacctaaagcctgctacttgggccatatttttgccataggcctttgcctggatccccactcactcatgagctcataatccccaggcctttagttctaggcaggacagtctgctgtactctgaggcaaacatggcagccagggagtgtggcacttgacatcgttttccaggaaacatggagaattctgagggcaagacttatcatcaggctttatttgttattacccaaggaagcgcaaacagcgatgtgaactttcagggttagtctccctctccgcttctccctgcaccttcacagccagcacaccgtgagggatttttaagtgttgtgaaagcattcatgacttttaggccgattgcaatttaggcccaggcacagaatccctggtgtcttttgcttactattttaggtcagcagatcagagttttgccagtgcagtctttttacagctgctctcaaaggcgtctctgtgtgaataaaagctgttggccttatttcccattatcaggtgctccacgctgctctgcttaagttctcatacaaaataaagaatcatgtgtattcttgatacacaataggaagtttgtataggtggtgttgtacccctgtgtgcatggctgccatagaaaaggcataaaaatgggaatgtgattgggcagacttgtgcactacagaatgcagtaaacgctgtaccaatgttgtcttgcttgttttctcccaggaaactgaggattggccatacattgctttggcaaacaccgcccgccctgctgtcttccctgagatctctaagaacaaggcccgtgctcctgtgcttagccttctctaggcagccagatgaagattgcttcctcttgttttcacagttgtattgctgaaccacctctctctgttggctgagtgttcatgacacctcttcctgaagcaggttagaagcttggaccctgtgtcatggaagctttggaagtagatgacatcagccccgccttagaggttactgaggatttctttagtacttttgacagtaagctggaaaaggctgtccaacaagcagaggtttacgggatccaagaagtccctgaactggtggggcatgaggtacttggtaacatagcagataatggtgctttaagaagcgttgcttccctgggcaaggggacaatgatttgggaccactgtaagagcaggcttttagaaaccaaagctcaaaatgtcttccctgccaaagaacagcttatggtccagagagggacagccccagataatctttcctggatggcacaaaaggaagcgtcaaccttcaattttttcaacatctgtcagcgtcggagggacagacctcgttctgtgaatgacttattggatgagaccacaactttcaagccaggccatgctcggtcaaggtccgatgttacccacgtagactggcgggtagtccttagcaccatgcctttgcagcagcagcagcagcagcagcaggcgtcccttcaaggcattcactttcccgggccatcttttctgttgtcttcacccagcaaggttgaagatgctcaaggaaatacaggtatggtttacaatcagacttctaatgaacagctgttgatttcttttccccttatatctgctgactctccagtacccacatatggattttctttctcccatacatatctttgcttcaaatcagctctcttttcatcttctgaagaagtatttagtgatattatgacttccgttaagtctccctttctaatcttttatgttaaaatattcttacacctaaaatagtattttcctctgaacactgcttgatactgcatattcgtatcagatgtttaccaaatcacacagtgagctttattaatcttgctctgtgtgtgtgtgtgtgtgtgtgtgtgtgtgtgtgtgtagacacactgtcctgcagaacttttcatttggctgaaggcaacaagcatcaatgaagcttcaataacttactcagaataagggacagtaaatgtcccatggaaatgtttcttactccatatacacgtgagaggcagtgacactaaaaggacacaggaaagagaaggcaccatggcctggctgctcggaaaaagctcataggagacatgaaatgagtttgcccttaaaggacatggaaattcaggaaaaaaaaaatcacagaagatgatagtcaaaatcagcgtgtgaacaaaggtgaagtgggtgaggtgtagcccagttgtagaacccctgcttagttagcacgaaaagccctgagttcaatctcaacctgagggaaaacagaaatgagaatgcagtggagaatgagtgtgacccgaggcatgatagcctttggaatgtagattacggcagtgctggtttctgtccatgacatgccacatttcacaaacagtagagtcagtcaccttttaagacacttgttccctgccatacccacagcttgccacttcttgtttttccttctagaccagtggttctcaaccttcctaatgctatgacccttccatacagttccttatgttgtgacccctaaccataaaaaaattatagttgctacttcagaactgtaattttgctactgctatgaactataatattaatatctggtatgcaggatatctgatacacaactcccaaaggggtcatggtccacaggttgagaattgtgttctagactcttacagatcttccagaacaactagtgggattataatatggacacagaagggaaggtgagtttccttataaagcaaggatgtgatgatgatcagatactagggagacatcacattactgggatccctgggcctggaagaattgatagctttgtattgatctgttacattcatgtaataggtaaactccttaactagcaaataactgcagtagatgtctgttagaattcacatggaattttgtcagtaagtcaccataaccatttgtagatcttggcaggacccagatgaagaggttatcatatttccaacttcatttttccagtgcgttctgaatataaatccaagaactgggcatccttgagttctctaatgcactggtctttccctttgagtacctgagaagccatggttgttactctttttttacttttttttttccaagacagggtttctttgtgtacctctggatgtcctggaactctctctgtatgtcagggtagccttgaactcagagagatctgcctgagtgctgggtttaaaggcatgcactaccactcctggcttgtgatttaaaattctggatactaatttatagtgagatctaagtaaaaattttaaaaggatattataacacttgagctttgtgggattgaaataacacatcttagccactgcttggtcagtgcaacaggagtaagcacacttgggcaaacatggtggtcatctcaccccttctttttctgacaagccctggggagcaggcaagatgtgtcatgattatctatctatctatctatctatctatttatttatttattatatgtaaagtacattgtagctgtcttcagacactccagaagagggggtcagatcttgttacagatggttgtgagccaccatgtggttgctgggatttgaaatctggacctttggaagagcagtcgctctaacccactgagccatctcaccatcccgtgtcatgattatcttatcaggtgaatagcagggcacagcaagggcctggtgctgaggctgggagtagaaatgcattctagatttgtggctgattacccgttctgagcagtatactattctcatctaggtgcatacagagagctgataagaattggccctatggatttataggcacagaagtcagccagtatgtttctggggtcaggggctgtctctcaggggtaagttccttgtggcacagccacccatgggacaacagatactgggaaggcagtgaggtgtgagatgacccttgaggccttgacatagatttcacttgtcttattttattttagaagcttatgaagtgtgttctggaggctatttgcctcagacatagacagtgcagggctgannnnnnnnnnnnnnnnnnnnnnnnnnnnnnnnnnnnnnnnnnnnnnnnnnnnnnnnnnnnnnnnnnnnnnnnnnnnnnnnnnnnnnnnnnnnnnnnnnnnnnnnnnnnnnnnnnnnnnnnnnnnnnnnnnnnnnnnnnnnnnnnnnnnnnnnnnnnnnnnnnnnnnnnnnnnnnnnnnnnnnnnnnnnnnnnnnnnnnnnnnnnnnnnnnnnnnnnnnnnnnnnnnnnnnnnnnnnnnnnnnnnnnnnnnnnnnnnnnnnnnnnnnnnnnnnnnnggttcaggtcataaaatggtaaacaggaaacagtacctgaggcacagtggcaacagttattctaaagaatttcagagtatgtggtagagtccaaggtttgttagctagcatcttggtaacatcccagtgtctgctgtccctgggcagccactctgaggctttgactccactgtgagaatgtctgactttgagccctagccctgatgtcagttgtataaagaaggcagttctgcaactttacttgacattcagcagatcagttctcatccacattgacagtctgtagatttttgagtgtggtaacaggcgtgtaagttaccagcctgtagagcttgtttggggaatcctcatctttattacattttctggataggcatactcagatgccatatggaacattccttattcccttggcccagatggctttattgagcctgatgtcaatgcacacatctgggatccccatttcccttatagcaaacttccgaatttctttgcgtgcccgagaagcacacttcttgaagcccactccatgggtgcgcttgtgaaggaatgttgatggtgtattctcgggtcaccacctcgttgatggcagaacggtccttcttctcaccacccttctttgcggtagccattctgcccggcccaagttggaaaagcaagactagctcttaacgaacacagatgagtgtctgtactaatgctcatcttctctgtatcactgtcatgttacttcctgagaaacaggacactcataggcatgaaggaattccccggaggatagaggaggtagaatcccgccatcacagaatgaagtccagacatacacatcttaaagtaaaacatctaatgaccacatgggtgtcagatatgtttttagatacgaataaagattgtacacacacacacttgtacctatatctgttttatatattttatgtatgtttaatagattatatgcatacacacatgcacctgtatctgtttattggttttatgtatgttcaatagattgtatgtacacttgcacatgacaaatgaagatgctactgtctagaaagaatattcaaataggactcaggagtcatttccaagctctactcctgtctcactgtacaaatttggaaaaaccttttattgtctctttaaaaacttagcaagacagattgaattatctccgcagtccttcccagccctaaaactgtatcattctaggatgtgcttgaatggtgtgggaactaattgctatattcagatcaatgattaagataatttaataactgaaacaaaagtatggttagaattttttcacaagtgagagatttctgtgtaacttttaagtctactgctacatgaactgcagtggtaactttttaaatgaaaaaaaaattaaaggaatcttttatattcgctgtagagtcccgaatctcaaccaactaccagagtggaacttgctctcctccctgactgtgtcacattttcatctgctgggtaagggcagtggtcagctgggcttttgtttctgtaggtgccgctctggtgacccggcatgctcctggccctgtgttttcttgttctgagtactttaggagaaggtctcaagcagagattttctttacggctagacaaaccaccgcagtctagtcctttatcctgagcttcatgccactgcttcagttctctttccccatctctcacttaaaaaaaaaaaaaaaaaaaggcaaatttgggacttgaactaaaatgactgctttttcaattatgccatttcttaaaagccctggagccaggagagatggaaatattcatgtgggtttagaataagtgaggtcaccaggacacagtgtcttgctgaatttgtgattcaccctctcacagattagtcagtgtaaaaaagttgctaaaataggtcacaggaagttgattgtgtatggtcaaaatttccactggttaatgatccctttttggccatggcagccataggagacccagtgcgcttcactgacagcctgtattccaattcctaacactgctgtaagagccccctgaaaatggagtgtttgagggtctttgtgggtgttcttttagtgcactttattctcttttgactagaaaaacggtgcttattaatttttcaaacttctaggttatctttctaaagcataggtctttgtgctactgtgttcatagaaaggaactctatagggctggagagatgacttagaggttaagagtactggttgctcttgcagaggacctaggcttgattcccagcacccatacagtggtttcctgttacgcgtgttccaggagatctgttgccctctctgacgtctacaggggccacactcacacagtaaacagacatatttataggcaaggaatacaataaaaataaaagtatacaattgaaacaaactaatcgcggctgtcacttgtgactctgtgtgaactttatgaagcatttggaatcttttcagccttatcacctttgttgttccttgccgagatgttttgccatttttcaatggaccttgtgcttcctggtccctggcttttgcccaagctgtgtctttataacggagattctccatgtcttttttgctttacataaatccttcattatctttcaaggaccaactcaaatgccacattgtccctcagactcttccagtttgttttttctcccccttttccagtaccctgtgtttttttttcttccataaacacttattctgttgtatattatagttaattactttctaccaatcctttatcttagaccagaagccctttaaaaatgtgaaccatattatagaaaactttgtactggaccaagtatgagcacacgagttccatgtatgtatatgtgaaagggagaatatatgtgagtgtatgtgaatgtgtatgtgtgtatgagtgtatgtgtgtgtatgtatctgtaaatatgtgtgattatgtgtgagtgagtgtgtgtgtgtgtgtgtgtgtgtgtgtgtgtgtgtgtatgtgtgtgagtgcgagtgtgtgcgcgcatgtggaggccagagagccccattagatgtcttcctctcttactctttctgaggtagggtttcatttttatcctggctcttgctcattctgctggactggctagccagcaagctcgggggaacaacccttttatctcagcttccccagagctgggtttacagatacctgctgccatacctggctatttgcattcgtataaaggattgaagtcaggtcttcatgcttcttgtacgaactttaccaactgagcaattgccctgtcccttgttaggctgaagtctgtgcatcagcactgaggaaaatcaggacaggtcgtgaattggtgtgctcttccttgggacagaccgtttgttcttctctctgcattccttagttgcctgtgggcttgggctttctctgtccactttagtgtgtctgttgttcttgttcagctcatgtttaggcagtaatgttggcaagactttacaggtatagcttctgacattaataccttggaaaaaatacaagtatatatacagactgaacaggttgtatttgtgtatttagaaatatatatgtatacacatatgaatgtaacaataattaatgaaaaagaggccataaatttgaaagagagcaaggaatggtataagggaaggtttcgaaggatgaaaggaaaagaggaagggatataattatagtctccaaaaataaaagaaataattttttttaagatttatttatttattatatataagtacattgtagctgtcttcagacactccagaagagggagtcagatctcgttacagatggttgtgagccaccatgtggttgctgggatttgaactccagatcttcggaagagcagtcgggttctcttacccactgagtcatctcaccagccagaaataatttttttttaaagatttatttatttattatatgtaagtacattgtagctgtcttcagacactccagaagagggcatcagatttcgttaaggatggttgtgagccaccatgtggttgctgggatttgaactcaggacctttggaagagcagtcaatgctcttaaccactgagccatctcgtcagcccaagaaataatttaaataaaatcagaacagaatagctatattttccctcctaaaatggaggtgcttctgttcccctttccttatctttagctgtgttaagttgaataaaacattaatatttgtagtaagagagttaattttgttctgagtcccctgctaagtgttcatccattatcttatttcatatttatagtagcttaatataatgggtaatgttgacctgattctacaagttgaaatggagacttagacaggtgacctgccccacagccatctaggtaagactgggacccagctagggataatcccagagaggacatgtgactaccccactccactgcctcctatctctaaacatgtctaggattcattcgctccaccacagatacaactgtttgatctagattgaagttttagagattagacttctactctcaacttggccactttgtaacgtaatccttgccaagtcagtttgcttcctggaacctctttgctgtcttaaatcagaatgttttcaaaagccagtgagcgatggcgtagcttgtcagtgtaagaacattaacgtttttccccctcccattagttactgagcacttggctaatgccaggcatcatgtacagcaatacttagcaaacgtcccagagaggggcagtcccagggtttttttctttttgctcttatcctcagtgtattaatgatgtctcttttctctgctctatggtatcacatggctccagcagctccagggcttgtcttctgtgtcaacagtcagactcagaatcgagagacagcagttctttttggtctctttctcagaggctcctaatggcacctcaggcacctcatggtggcatgcccagtctcaaggcaatttctagtcaaggacaatagagtactgttaagtgttaaacaaattatgattctttccgtgtgctagagaagaggccatgtccctgagcgtatacctgatcaaaacttgggttctcctggagaagcattgcacaggttttgccctcgctggagttgagagaatagaatttttaggattccttctggctcttacatttctatgattcgctaagttatgcaaagatgtgctaatggaatgctggttgccttaaagtctaagggagatccttttaagtttattttctttagatgatagaagcagagcagaaagctcactgtggcacttaatgacataaaaatttatatttggattgtttgctaggttaataagttagggttgtgatctcctagtcaagtttacatcagagaagagaaattgagcaggacttgattgcctgtggctactattgcataccacaaaaataacatattcggctcatatttttcttagagcctatgcaagtgacctgccttttcttctaggtttatgcgggagaacaagtgagatgccttttattacttaggaaggttctttagtgtaactgtaaagaatagtatttgatattcataattatgaaatagtcattatttgaaattcataattttatatgcataatgatttgatgctggcaccaagtaatcttttctgacagaataagtttattaagaaaagtctgtggagacaacaacaggatatccaagaggaaatgaggatccagtattgacagtgtagcagaagccagaggccctgaaccagaccaatgactcactgcaatgagcatttgcaagtaaagatgtgtggacagaagggtgtagtgtggggcacaccgcagcttccactgctaggttttgtgtgtgtgttctttttttttttcttttctttttttgatttttgagacaggttttctctgtatagccctggctgtcctggaactcactctgtagaccaggctggccttgaacccagaaatccgcctgcctctgcctcccgagtgctgggattaaaggtgtgcaccaccactcccggcttgtgtgtgttcttattatttattattttattttacttgggtggagaggttgaaggggaggagggtggatatgaagggatgggaagatgagtgggattggggtatatgatgtgaaattcataaataatcaataaaaagttaaaaaaaaaggaactgaagaaaaaaaaaaaaacccaggaagagtgtgtggggtagtgtgcctgtgttatgctggcaaaagtgtactggcaccatggagcatgcgtagtgtggcccttatgctacatgggagttcaggatgagggtaatctcagtttcacttctcccctgtgctgatataaagagaactgggctttaaattagttcagagtgacttctctgccctctgccttgaacacaatagaaaactataacataaaacgaattcgagagttgtcagttgtgtttcctgagctaaaattgcaaggaaaagagtaatgttagtgatctaggatgccagagaagtcctcagtggagtatttcacctcaggtctgagggccatccactaagctaaggtggtgcgaaaccccacatagagcgggtgggtggccagggaactgacctgcacaggagagcccatgctacagagggtgtttagaccaggcacactgacttaatgtggtatgttgcaaatctctttcaagacactcaaaaatatcctgcatgttgagattaggatccttcacaggaagtctggaagttggcaggaactgagggtagggataggacagccacctttctagtagccatttgtgcccacataaaggccaccaattagaagagcactcttggctcttgtttgcgtgctccaccctgggaaggaggggtggcctattggcaaatttcggagaggaactaggtaagagtctctctcacagtaagtaccagttctgctttcagcctgctccagacctgctcctgcacgtcgtggtctttcatgtgagtctccgaaggggaggactgtggctgtggagggctgcttgtgatactaccctacaatcctgccgttgtgtttgctacaaacctaagctgcagcctccaaaccagccgatcattttatccgcttgtgtctgatgaccttgccgggctcagttggtttaaatctttggtgaggaagaagaatgcagtttactgggtctcctccagcttcattggcatgcacaatgggttgatgggtaaaaagaactagaggagccagttgtgttcaacacttctggaggctatgacaggagaaacaaagttggaggctagcccggacttattagctagaccctgtcttaagaaaggaaggaagaacaggcggactgagtgggaggccctgttagcctttatcatgtgaggagatgacttaaatcagagtgactgtggcaaggaaaaggaaatgagacatgtgaacagtaaagaggataaacttggggacagatgggtttccttaaaaacccataaggaaagaaaggcccaccgtttgagtgccgctttgcttcctgtcttctctcaataaccagctctacccggtccaacattgacacgacccccttttcaaaatgtgacagaacttctcagatcgagatctttcttctctgaatccattagctgaacttgttgaaaggctttgagtactttagactagatagcatggactctcagacccattttctcttctcttctgtgggctatcaacaccagatcctagcaaagcttcccacagattccagcaaagttgtttgttgatacaatgtacactgtacattggtagagacagcccctggtatatgggagaaaagacatcaggatgactgtccttggaggagagaattcttagcaggaaatacaggaaggtgatgtgatagaggagagttgagaacagttctctaatttgagtgtaaggtgtagtctcactaaggaggtgaaaatggaggtagggtagagaagggtgggtagtacataaagcactggaaagtgtgtgtgggggggttagatcgagtatgagaaagggtgagagaccttacagacatatcaggacagacaataccctcagaacatgggttattaatgtgcgattgtgaaaataacatgaatttgaaagttcccatttttgtcatctggtggtggtggcacaggcctttaattccagcacttgggaggcagaggcaggtagaactctgagttcaaggctagcctggtctacagtcaaggttacatagacaaaccctgtctcaaaaaaaaattctgatcatttaaatagagatacatctatagttgaaatggtataatgcctttaatttacttcagacattctaggaaaataatgaaataaaaatcaagagttaaagaagtagaggtgacaaaacaaatatagtagaaacttgatggtgtgtgtgtgtgtgtgtgttgaatgtatatgtatgtgtgcatgtttttggatatactttcctgtgtatatatggagaccagagaccaacagcatcatgtgccttcctctgcctctccccaccttgttttttgagacaggcttctcactgaatttggagctcacagttttggctagattggctagcctgcaagctcctgggaccttcctctcaccagcccctaagtgcaggggttacagatttgcacccctgcctggctttttgcttgagtgcttgggatccaaactcaggccctcatttgtatttacctactgagccatctccctacacaagtgctttttgaagctaaatgaatatcttcactttctacatgtctttaatggtgtttgaaaatctccataatggaatattggtggttaagcttgggagctcagactaagtatgacttttagaatgtgtgaataggtttaacctgacaaggaatatggaaagggctaagagagacccagaaagctatgggatagccaggaaggaggcagcctggctcttgatgaagatggatgtcttaggatggaactgttttggagaattgatgaggaaataatgataaagaggaactctggtgggtgaggtgtctggtgggtggggcatgcagaagtaagtcaggtgcaggcaggaaagttctctcttcctctttagttagctgcagtcatggttctgataccactgctctggggaggaccaggagaagcggaaagggaccttcattaaagaggaagtgagccagttctgacagccagcagagatgctgggcagcagggagtataggtggtggatacgcttgcctgcttcttagttttatgaagaatttctgtggttgcttcattatgaaagttgttgtgggtttttttttttaaagatgtttctgccagcacttgggaggcagaggcaggcggatttctgagttagttcaaggccagcctggtctacaaagtgaattccaggacagccaggactataaagagaaaccctgtctgaaaaaaccaaaaaaaaaaaaaaaaaaagaaaagaaaagaaaaagaaaaaaaaagatgtttctgcattttgggggaaatggtataaatcttattatttatctatctgaatcacttatattcattaagattgaaattttgagcactttaaaatatatgtataaatttaatgagttaaaatgctaagatctagggaaaactccaactatggcaaaataatgagtttacatatctgtgtttgtgtgtgtatatatatatacacacacatatatgtatgtgtatatatgtatatatacatgtttatatgtatgcatgtgtatatatgcacatacacatctatatcttctcatttgtcagtagcaaaaaatatttaaagtaaacttcagatcccatagaaagtactagttgctgggaatcagagagacatggtagttctccagccctatagttacagatggctaatccttcaagcacagatgtaagaaaagaggacatgagcagtgctggtctgagaaaggggtaactcctgagaagcttgctggcctttcctgctttcctgacttgtttattagttgtatggagacagggtttttcatggcagcctaggctggtctcagacacagcaatactcctgcatccactccgtgcaggctcaatcctggagcagacagtgtcggagcacactctagctttctaccctggagatatcctagggaaagttcttgttccttccgtctgacctgtcatctacatctgagtgtagacctcggaaaggggtgagcatggtctgctgtgctgctgggccagcagctgcagtaaaaggctctcaggagagtaagaaagggaggtggtaatttctgtctaaaagcaggagagctgggttctgcttcgctcgggaactcaaagctgagctgctgggtcacaggagggctgagcagggcacaagccgaggtctgactgtaagaaggcggcctgatggaaatgagagggcagagggggcagcagtgccactcagccctgcctgcctcctgcgctgtcagcagagagatgtctgagagtaggcacccattatctctttctacaaaggggctagcgtgggctgtgaaaaattaacggctttttagttgccacagaaacagtaatgaattaacgttaggaccagagacataaagcagcggaaacagactgttcgccacctcttgtctctcctttcctctgatggtttggtattttaagatgagaactagctagtccgtctgtctgtccatccgtccatccttccttctgctcttccctccctccttacttctctccttttcccctttgcaagtgtgatctatcttcagggaatgagtcaggttgtggctgtctgtagaagatgtcagcagagagattaagaagtagcttagacgccgggcatggtggcgcacgcctttgatcccagcactcaggaggcagaggcaggtggatttctgagttcaaggccagcctggtctacaaagtgagttccaggacagccagggctacacagagaaagcctgtctcgaaaaacaaacaaacaaacaaacaaaaaaagaagtagctaagacaaaaaaattttaccaggtcacctttttttaaaccattctctcccgtggatattctttcgtggcagaccaaagtctcaggagacaaggtatgccagcctgtacttacagtctctgcatccaggaagctggggcagaaagatcttagtttgaggctagccttggctaccaaaagagagcctgtctcaagaagtaaattcccaggaagtctctatactgatagtcccttttattaaagctctgcatggcattcagtgagggttaccacagactaaaggtgttgtgactggataactgcaagcgaggaaagggagaacagaggtgggacgggaattacgccccttgtgggctaggtgttgtgctagaagctctattctaatttaacaagtactcttttttagttttcattttttatttatttaagacaaatacttgcttcgtagtataggctagaatggttctcagtgtgtagcaggctgtccttgaactcatgagctctgtgatcctcctgcctcagtttttccagtgctgacattacaagtatacctatacctacctaacaatattatatttactaaggacctgtttttgtagtgataaggtgttgtcctgtgtgctgtactgtagaaaggaattgagatcttactccgttagtgaagacaggcttgaaaaaacaaactttaaaataccgtttgcttgaccattaaatagcttagataacctagtctgataaaagcctgtggtagaggaatattattgtagggctgcctgatactgaccagggccgtgtgcctaccgataagatgagggaaggcgagaggagtgggaggaaaggtaagtgtgtagtcgcttactgaagcagtggcacagaacctcataagccgagggcacagcacaagcaccgtggactcgagagaaaactgccgcctgaggagagacctcggaggtgatgcagctgagccaagggtagagatggtgctgcacagaagggcccgctgctgtctttagggctgatgaacttgcctgaggaacaggagtttctaaacagcacagttcacactctttctgttctccccttctggcttccccaacctaggaaaagatgggagtctaagcagggaagtagcttgtgtgcaggagtgcgctcttgtgtcctggagctctatggaatttacatacaaagggaggacctggcaatgtggctgatgcacaggacacacgtgctttgttcacagctttctcggcatttctgtgtggcacccaggcccctgcgtcacagcggcatcgtgtgctccctatgtactcttgcgcttgttcattacctcggggtaaaacatttcccagatatgtcttgccagttgggtgccacgtagaatgtcactattttgttttatctgaaccagaaagatgccacgctcccaccccaatgtgattggttttatgtgcctgttttctcataattaattattactttgacttttctttttttctttccagaacacaagcagacattcccaaacatcctgaagaagggttatctggagatcaggaagaaccatgacagttactggcagagctgttatgcagaactctcaccctacaacttaaacttctacagccttgatagcagtggcaatcaaaacctgtatgccacataccagctttcccacttccagagcatctctgttttaggcaatcttgaagctaggatggtagacactgttctctatgacaattctcaactgcagctaaaggcagagtctccatgggaggcattggactgggggcagaagctctgggaagtcgtgcatgctgctgtacccaattacatgggacggcagggtgagatggcaaactctccaggactcatccatcatggtgactgtgcacagaaccactgtttacagaagaaatccagtgggctgctggcctcccctgtcttggatagccccaaacagtaccaaaatatcctcaaatcagggacactctacagactgactgtccaaaacaactggaaggcctttacatttgtgctgagcaaggcctatcttatggctttccaccccggcaagctagacgaagatcccctgttgagctacaatgtggatgtgtgtctggctgtgcagatagacaacctggatggttgtgactcttgctttcaagtcatttttccccaggatgtcctccgcctccgggctgagacccgacagagggctcaggaatggatggaggctctgaagacagcagccaacgctgcaaggagttctgagcaaaacctgcaagtcacactgcggaacaagcccaaggatcagctagatggccgcgagctgcggaagaacaaacgccagtctgtgaccaccagcttcctgagcatcctgaccacgctgtctttggagcgaggactcactgctcagagtttcaaatgtgcaggtatgaaacatttcatctagcctgatgctcatgctggagcttccttccccaagccctatgtggcatttcacctttaacccttctcattcaacaatgtagatgttggtgttacaattgtctgtatatcaaaagcatctcttctctaagaagtgtacttactgcattaaaaatatgctgggtgccaggtcagctagggctgtgaagtgagataaaataaataaataaaataaaataaaatctaagtagtgcacagggggctaagttaggttggaagctagtgtgggctacgtatcaagtatcaggtctgtcagggctactgtgttacagtgtgaggccttttttcaaaaataaaccaaaccgaacaaaatctatccatcctaatgccctttggtaatgtaaacagaagcagctatgcttacctcagtgaatcacaatgacttggccaatgcctggccaggatgggatttaggcctcctgagtcagcaggattctatctcctctgccttcttgaataatgatcactgtaactgtgcatgtcacagattgtttcatgacagaactttgcatcccagctaactactgacattccttaggcaaggcaaatgttgttcctagctagcagctgaaattgatcatgaccttgtcaaatcttgttccagtagactctataaagtcagtattgaggacagcgtggggatggccaaaagagggtgaagagcagatgactgctgagataggaggggaagaagcccagtgtccctggaacactgtaagattgacagagtggacctcactcagagctcttcaacagtgctattcctctttatccccattctcctcgcctctcacaaacactgaaataggaagagaaaggtgagaaaagacctccccctaaaccagatttgttcacctactaagctaaattaaagttacctccctttcatttgtgatgataacttaccacaaagacagacttaattggaagcctgatggagaaatttttaattcaagcattgtagacttataaatatgcgtttaaaagtgaaaagatctcaccaccagccaagagtttatgctctgttcttgccctgcattgaaaaaagcaaatggtgatggtcagaatgaaaacctacattttaaattcactagagtcacgatggccacctttctatcggaaaacaatggactttaaggagggtcttagtgactgtgcataggaactttgcagtgaggatggcaaaaggggaaactctgagccagaaataccagcacaagcagatgtgccacctgtagttctaacactgggaaggcttcgaggcaggaggattgccagtttgagaccagtctaggattgatcatgaaaacctgtctcagaaaacaaaaacacgttgagagccagcatagaagccataggaggtaatgtgtgtgtgtctgtatatatgacaagagcagacctgtgctgaaccagttaactacttttggaagtgtttttgataagaaaatactacctttagtagttttggtttgtttaatttgtcatttatttattttacttattcttgaaattgttagcatttcagtgtttttttggtgcctatattattatattttggaattcaggcattcagtaatactctactaattgcttacaggataggcatcctgaattcataatatacttacttgtgtgacattagattgctgatagagtccataaattccttgtaattggaaaataggagactagcccagccttgttctcaagttagtcactggagtctctgccttaagagactgtatagtaagagaatgaagaaagccctgcgtgggctgtgaaggctgccactcagttaacacttctcacctgtctctcagtttgcttcctgaaggagcatgcattgcccatatgttgcattgcattgagtaaagggagtgttggagagcaggcccagtgcaactaaagcttggagagagaaaaacagggaaaggcaaagcgaggagccgaggcccgaagaaggaagcgaagaagagggaaagtattacataatgggtgagagcagacctttctggcagtgtctgtcacccagttccctgtgacacgacgcatcccttggctgtctaaatttggagcttgataaatctggactgttgggggtagctgagtacggagagcagggagctcagcacagggttacaagtggaattgggttgctcgcttgcgcagctggtgcttcatgcttcggcttggcagtccgatggggtgcaggtgcgtttctaactcagagagaccgctaacttgtaagtgtgtaacgtacagtgtactgcattcaagagtaaaaccagttcactccctttacagcatatgtggtttgcaggcattttcgttcccagtgctaaaccaggaagattgtttttctgcctcaggttgggaattattctgtgtgtcctgtagggggcagagtctcaaaagaaaaagaaaaagaaaagaaaagaaaaagctttgttatacaaacctgaatgttttttaaattagtgggaggctgttagtcgtccaagaggttgctatagcagatggcccttttaaggatccatgcttctctcagcattggtgatttaaatcacttgctttgctttttgtaactgtgtgctgatgacacagaccgggtggaaaagcagctagagaactagcatgtctgccttccaggctgccagtcagtttagcacattggacttcatgcactcattgagaagcaaattcacagactttcatggctttagtgtatctctttagactgttaagtttttaatgtttacttagtccctcccccattaaatattttggatgaataaggttgcactgagtaggctcttaattctgttgtcatttggttgctatttagaggagctacaaatattggcttttacatatataaaatatggaccgttggtcctgtttcactaaattctttctctaagtgaagacttcttaggtctcttaagttttaaacagttcctacagagaaaatggagcatgaccataccaggatgcctgaggttatggttttgaagctatatggggagccataactccatatttcttggctcatgcttagacttaggatagttgtgtgtgctagctgcatagcttcctttccagctccgtggctgcttagcaagcccttgctacagaagcctaaccatgttcaagtctgtctcctgggtacccctgagctctccagaaagctaaccatgttcacgccagtctcctgaggacccctgagctctccagtcccacctcctgacggctgagaacccattcctgtgctcgtttgcttattctctgcttgccaagtgcatggctgtgcctgaggtcagagtgttagaaatgtggacgtaaccccttccctcattagactgtaggcagctaggaatgttagatattaaataataacattggtaactgccaaatagcagccacgaccagattcacagatgtgacagccacattccagatccccgagccgtcagaggtaggtagagccaggtaggactgtagaagatcatttctggactataaaaaaggcactcaatgcagatgaacttcatgtttgaccatgacgtcacagaaagttcttgagcagagcaatgcatgctgggcgaggtgctgcagaagtgttatttggggatgcttttctatggcctctgtcaaaagcgtctacgatagaaaatgaggtgtgcttctttagtgaaacacaggctggaattcagcattgtatttgacaataaggaacctgtgatttaaaaatattaatgcttaaaaggtgattgttcagtttattaaaatatctagtatatggccataagtgtttctaaatttggttttcataactgccatgtacattagattaaaacatgcttgttttctttaggaatttgacatgtgtacctactcagcagatacatcgttttcttggttttggggcacacagttaagtttccagcaattaagaaacctagcaattgagtacaatagtttcaagagcctgtgactatatggtgtgacagggatgcagtgctcaccttcaaaactgttcctcgtgagactgttctgtagtctgggtgtgatttggatggcccacttagggcagtgctcatgagtgggactgaagttgaatgtgggaagggaccaagagtgggcttagggctgcctccggtgcttccctctgccggttttatggtctgttccctggctgctgtttaacctctgaggactgctgttggtgactgtgcatctctggcatcaagagctgttgctttcctttttcttcccctgcagccctgggaggggtaaactcaaaggggggaaaagttttgctgtgaattcttcagccatttagtgcaaattcctgtaattaccggcattgtgtctcttctgaatggcacataatacagcagaagccattcctaattgagaccttacaggaggtacaaatcccctctttgttcagcctgacaaattagtgccagaaagtggcagggtccgaatgggaatcaaaggcaagaagcacaaagatgggacttaaggctacagtaataaccctctcttgtcctgaaggaaaaaagtaatgaccaatgaaaatgaaggctttttcctccctctgtgtgtgtgtgtgtgtgtgttgttgttgttgttgtttgttgttgttataaattcccttgacaggacagcacctcggggctgctctatttatttagtaaaagtgattaaatagtaatacaacagggtagcccattgtttccctgggcacccccatctcacagacccctgttgccttggctaattgattgacaatgaacctctgaaaaagaagtttgttgttaggacctgggatgtggagcatccctgcaccctgctgtgtgcgtgccccgttcatttttgtgtgaactgtattccagttttcctttgcctcaccttactgcttctttccttctccctttgctctctctgtcttggttacttctctgctcccctttgctcccagacacagacaagcaggtaaggaagagttagacttttttagtacaggctttgcagagatctatctttggggtcagctccccgttccttctgggggtcgatagaacaagggggaaaagggattgcacgtgctttctgctgtttttaacgtgtgggaatggttgtctggaagttgtgtttgctctaagattcccccccccccccaaattctttgctcaattgcttgaagggaaaaaaaaatgtccttataccaatagcatttacatgttgggggagggggatttggaggcagaaacaaacccctttttcagtggctctcagttcctgagaaaccagacttgattacttgaagatcagatctggctgtttgttggtgtaactcaggaccttaaggatgctggaagctttgggaagacaaccaaaggcctccaggcagataatgaatgcacccccaccttatatatgctcaactagctaagctgaagataaatccctaatttaactctgttacagctgcaaaaacaaatcattttaagcccccaggaaagcaaaatatgttaaacaaacagtatcgacctcactaataccacatggcatttcgtgtgataaatgagggcatatttctggcaagtgcctgttttatgacatcgtttagacataaaggataccttcatcctagcaatacaagcatccccgatagaaagtatagagaggttaattattcattcggtagctaccagtttggaagtaagcaacagttctttctgccgtgggcctcatttacttactggccttgaagtaaatcccgtagagtggtagttgttgagaaaaagaaattgagtctgattgtatgtgtggatctcttggttcccaggtgcaaagaggagcagttacacattttactcttagggagaaaagtataaatatgttagggaagatttgattttacccggtgcgaaaaattagggggtaatttggtgtaccaaagtggcaggtcttctaaggaaatgaacttggaaaggaagaggtttttgtttgtgtttgctatccttttatttactgctgcttcagacttgtctcccttttggtaggaatggtaataaagatttatttgatcagtgtatgggaaggtagagaattagaggaagaaaaacaaggaagaaaaatgcaaatatgtattctaagccatagaatcagcttgaataaataaaaagcacttaatctgatgtttccttgtcatgtcatccaaattatcttgttactgttttgtgttgtgatttcttatacaaaggagagctcactagggttttgtgtgtgtgtatatgcgtgtccgtgtgtgcactaaatggctaaattttatttctctaaccttgaatatgaacataaatgttgcttgtagtaaaaaaatcttcaagtagaattttaattttaatgttcatgtcaacaaatatttagaagggagagaccatatttatttatttattaaaaatttattaaaaaccttacatgtatcacacacattctcccaggatccatgggatatgtaaatgtgtaggctgtgccctccaaagttgtacagaaagccccttccctcaaatggtatgtaaaagtattggagggaatgctcaagagagtgagtgggaggccactgactccccattgtgatttgaaagctgaagagttaaaatggccttccattttaacttccattttagactttgtttttaatctcctctgggagagtctccttggcttttattacacctagaatagatgatactgcatgcccattatgcagtagagaccatgcgaggcacaagagaagagaagaggtatggcctggaatgcccaggatttacttggtttttggttgaggacacacagagggaaatgaagctactagatatgtctgctgtgcagtgcttggtgtttaggaagacatctggcatccagcctaattcccaacactgtgaaacagggttatcagaggccacagttatgctattgtgtgaatgactggcagtgttttacccaagcactgttgactggtaggtgcatgtcagtctacaaggttgtccaggaagatttcagagtttattaaggataaacattcaagtcctgcctgggtttccattcttctacttcgagttcgatccccctggataaatcacttcatttctctgtactttcacttttctcatctcaaatgtgagaacataatcacatctaccttactactttgagtacagataaaatttgaatttaagggcttaggacagggcctggcacctagtaaggctcgcttttattaatatttgcctacatgtgacagttgccccgatagagatcacataaatgtacacaccacagttacagctattacaaaactcagttggaccattaagatgtaaactgacagagctgagcaagtcaagctagtgaagtggctgaagacaaatgagaagagacttagagtgatgggtacccaggcttgtattcatattcagaaaattgactgcagagatggaaggcagaataaacctgaccagcaggagtccatgtaggcatacagatgaggcaacttggaagctagcattgggtctgctttggctctaccaaaagcatttacaaaacagtcccccccccccccaatgattatctaactggtgggcagctcagctggtaaagctcgtgacccacaggtaaatggagaaaacagacttctaacttccacatgtgcactgtagctccaacacccttcacatgagtggatacgtgcaacataaactttttttttttaaagagagatatccttactgtcctcagtcctggctggaccacatctggaattttcagttacagatgttgctcttcaagagtaaacacccagccgagcatggtagcgcatgcctttaatcccagcactcaggaggcagaggcaagcggatttctgatttccaggccagcctggtctacagagtgagttccaggacagccagggatatacagagaaaccctgtctcaaaaaaccaaaaaaaaaaaaaaaaaaaaaaagagtaaacacccacatctgttgatatagatggtgaggatactaaaatcagtgtacacatgtgactagaagagggaggacagaatgttagtgttgcatatttgaaagctgccacttatgaagtaggctcacttagtattgttccatttgacttatgtaacagaactactacaaatgggctggacttcctgtgtggccaagggagaaaataagcagaggcctgtctagtgggattagaaaacctcgactttcagatgtcaagatacttagactgaaggctggagagatggctcagaggttaagggcactggttgcttgtctagaagtcctgagttcaatccccagcacccacacagcagctcacagtggtctttagctccacttccaaggggcctgctacgctcatagggacgctgtggacaccagtcatacaagtggcgacgtgcaccaagacatcatacgcacaaaacagaattaaaatacaaacattgcttaacatgatacttagactgtgtgcgtttgtctctctgtagcagatgtagtaattcaggccttctgcaagtgtttattgagcccctactaagttctgagcaccatgtttgatatacagaaaacaagacagccccattttgtgtaagtgattataacacaattaaactgagatctttagttctttctatccctacccctcaatgttcttgctctatacagtttcttttatctcttaatctctcataattagacataaataagattaatctcttccattcgcctatcatccaataaatcctttttcctttggtaaagagaacttacacagtaggaatatcaattgggaaagacggatgatgggaatccttttcctggctctgatgtctgtcattgtataaattactctactttctatcttttagagtctaagtttctaggtctaggaaaaaaaaaacccttatgggtagcaagaatatgaacacacactgaaatagtaacatgagtctatgaagaacaatgttatataatttgtattttaaactatttcacatcctgaaattcaaggagatttgatcactttatgtaagtaggccgtttgattttataggatataaatttgcctttttgatttattcctagtattttcatcacagaagtcacatgtatctctttgatatgtttcagaagaaaaagatcattttgaatttcagaagacagggatcttttgatagaccttcctgaacttcataggcatcactgtgcttttttttaagctgttcatttctctgagtctttgttgctatactttggtctggaaagttcttgtcgctttttgtagcttcctttttggctaacattgttctcatcacgtgttcgtttctgcttaaacttctgaagaaagtgttactggacggttggattccacattgagttaaaagtttctatttactgacctttccctggggaagaaattggtgtaggtgtggttttaggatagactgggtaggttgagacccttcgtaattcctacctaggatctttaaatgtctgagcttcccatggaccctaagagtaagaattcttatttgggaggcttcctaagatctgtctaaggcggaaacatagttatataaaaagttgccttcttttatagtttttggacttaggctctttctatgtagttcaggctagcctgtaacctgtaattctccttccttgagcctcctaggtacctaaggattacccctaaacttgatatttaatgtatctatagataaggtaatctaatagagcaataccaatttatttcttgaattaatttttttaaaaaattaattatttaatttttggaggaaacatagttggtcccagaagttgaactgtgggggataacttaaaagttaattttatagtaggaaataggactttatgcccacgtgtctttccacattgattaatgctaacactgaaaatgttttaatgaaatcaaatcaataaaaacccaaagagcaccaagctccttctcttgttttggatggaaattagggcatgctaacaaagcagtggaccctaagatcaagggcggtggctatggatataattctgtattgcacctactctgttgtatctcaaatgttctttctcccaagtctttcttggccatctctacttctgctccttcctttttctcatgttccaggtaaaattaaacattattctcataagccatccttgtctacttgtttggacctctgttatggcccgtgacttgtgtctcactttttagagaaaagaccttagtactctaagatgcctatcagagatctgtctaccccaaggtctatcaaaagatgccttagaatcaggcgtgtgatgtgatgtgagaaggactgtctggacccatcctatgacctattgaagttacaacccctgaggctttattatgacatttccaaattaactaaatgtatattgacatggagaaagtactaactaacctagctataaaatgttctgttgttgttcatttggtttttcaagacagggtttctctgtgtatcagccctggctgtcctggaacttgctctgtagaccaggctggcctctgcctcccatgtgctgggatcaaaggtgtatggcacctggtaatagaatgctcttagtaggtaaatcaaaccatcctttagtttttcctaggttttatgaacatattcctttaaagtgtttcttctgtatatgttaagcatttcaaccatgaaggtattgatttcctgaaaaatcaccaggttttcacattacccttgcactatggaagcattcatgatattccaacagggttctaggctgtgatgaatttaaagaaagtactgggatgggtctaactctttacctacattctggcttcattttgtctgatgagcatagttagtatttgaattttgaggcagccttttttctcccttaaatgatttgcctccaactccagcatctgtcactcagactgccgtccacacgagctcctaagtagccttgcattctaactttcccgtgtgatatatcagttgccatgagtgtgagcatgttaaagttcagcttggccctatttacaggcagtcctatttacaactttcagttgctttccacttgtaagtcttgaatttcagcatccctactgcatcttggcctgtccactgggtttcagaccctttgcctaagttctagcactggattcattcttttcctcaacacttgtacccgctcccaagttctcaaatggccagttgattctctttggagagtgcggctcccagtgctacccaaactcatatttcaggtcagtgtcctcaagtcctcaagagcactttttgcaacccctcaaactgcttaggactttctaaatcccctcactgtaatgcaagcttagtgccccttgctcaactgctattcacaattgagattgtaagatttttttgtgtaattgtttgcttaatgtatgcttcctgaatgtggctgcagatattgccctggcagttgctgtattcatcatgttcattgccatctacctaactctgcatctggtgcagtgtagatgtgcactgaacggttttggtgaactatctggaccttccttcagcactcccacattggctttgctgctctcccaccatttctagggatctcagacaggagtcatccgcataacaaattgacacgttcaccactaaattgtctaagttgtttaaaatgtttagtagatgatgagtgtaaaacctactcatgccaaacttgagatgattctacatcttgcagcttctaggcacttctgagttttcaatacgtgacttcagagcttcgctgtgctaatatgagggataagcatgtaacatttccaaatgtgcttaacctgcctccatggactaggggttctcaaacttggcttgcccccttctgggaactgcattatcagaacttacttgacacgtgtgtacctattctgtttcaactcagttattcactgcagttcaagcatgacacccagtccttcataaaactattccatttcacatgccagctacagttgtccaggaccactgggctacattcacgatgactggctctaaatgctcaggggttctcatactaatttgccagaacaaccaacagaactcagaaaagagctatacttacaattaatggttttattataaagaacatgaatcaggagcaaccaaatggacagacagactgttcttcttggagaatcagagtgcatcaccatctcatcacatgatctgttcaaagtgaggaagctccctggaacttcatacccatgctgtacaaaattgctgtttgcacagcaattccatgacataggtaaagtaggttgattcatcagccacatgtttgaactcaatcattagccactctttctcccttggggtcaggctgactagcagaccctgctctattcatgtggtggatctttctggtgaccagctctcttcctaaagccattgaatggcttcattactataaactcaggtgtaatttaatgggctcacaagtagcagaggcatttgtatcatttagggaaaattctggctccctgccagaatccagggataaagaccacacatgttattgtatagcagtacagggtagtatataaccatttcggaaaccaaaatggcacctagctagaagagggatacgtgatgtatgtggtttccccctaggaaaacaagtagccctcagcatttacctgttccattgtttaaatcagcccgctttcaacacagactgtagctgtctaggagaggagattttggatggtattttcctgggcactcctggggccaaattgcttcagagtcaggctagaacctatcagctttattctgtccacctcctgccactctccagagcaccagctgctctaatgcagataccactctcaagttttaccttaaaatggtgtgcttattttttaatatatacaaaataatgagctaaattgcttttctctattacttttaactgaaaagaaaatgtaatttgttgtgtaaaatgtaatataccacagaaactagggttccaagattttagatgtggattcgaagctatttccaacaagactagaaatcatattcaccaaagcttatgtcttccccgtttaattcatatggggctgaaccaaaagccttgctgaaagttactgtcctttcaaatcaccaggcctgtgcctctgacttagaggatcggacttatcttgacagtcttgatctctttttcctatttcatcaataaagatgtccttctcaagccccagactcttagagaccacacagaataataggcacacctgatgtgtggctgggaggcatccagactcagtgggtacgtaataaattaggggcacagaagcatggtctcctactggtagcctgccactgacttagagcctcaagccagcctttccagttttgtgagtcagcaccatcaacactttgtcctggggggaaggtttagctactttgtctgtatacagttcatgtattacgaaattctagccaaaccaaagtcaaatatcttaactcagcaatactgtaccactgtatttttgcccagaaaatatggggaggttctttggtgatgtcttagataaagagaagtctgtagcctaacaaaggatgggccacctttgggaagatgatatttctcatccattgctaggatgaaggattttagtttgaataaaaggtgccagataatgccaaaggtttcctggcatctcctgaagctaccaataatcctaccatcatgcacatgccagttgctttcctctttccttccctaccttgagtggatgctttctgtcctagccatgaaccttaaggagttttacagggttcacaaacagtgtgtcttcctttttctttcagacatcataaagaagagaccgtaaagaagagattgtattgtttagagattacatttattattctttaatgaacccctaagttagattcatttgtgcatctggccacagctggaatccctgagataataccctcttactgcagtaggcagaataccagctctctgaggtcaagtggaacatgccaggatccttcttttaaactcacttgttaggagatacctcagatggatgacatttgccaccaaaggaaagtctagtgacccgagtttgatccccagaacccatgtaaaggtagaaggagagaaccagttccctacagttgtcctttgacttctgctactgcacagttgtacatgtaccccctcccatcacacactaatatataaatatttaagaagtaaactaatcagttagatacctcatttctctgtctgtgaagagttctgattaggggttgggagagaattagggattattatgctaagaaattcctttcaaatggcaaagtggggaccagaaaataggtattttctacttatataggcagtttttaattttccctaccctattaaatgaaaagattaaatagccttgctttaataccaaacatttagttaaaatattagctttggaaatggtcatagatgtgttttaagaggagcagaaaaacctagaagtcataaaacaaaggaataaaggaaagaagcaaggcaagacagtctccaaaactcataaggcatatggaacttggtgcgggatgaaaatgagatccaagtatggattgataggaacctgatgaaagtcatctttttccattttgagactgtctctagtactctttgggtccactctcatgactttaattttatcaaattgttgtcattactgaaatagctcaagtaggcattactctgagagatgctgtcagggaagaagaaggaagattgtgttttaaagatactgtaaagttcaaagagatgagacctcatgcagtatgagagaagagaagcagtgttaagaacagggagagacgtgaggggaagtcagaggggctgccatgcaacactacatgtgattaagccacagactgaatggggctaatgcaagtagagacctctaaatccaagctggaagaaaagataaggtccagagacagagtagaaacagcttgtttctcagaaaaacaaaatggagaatatcaacttttaagctgctaaaaggttgttgacctttgagaccaatcataatagaaatgtaactaggaaatcacacagagagagctagtggtgatttagcagaacattaaatgccaggggaagtctctgtagaaagaacgtaattggagcatacattggcaagataaagtgtttggagcagggctgggactaagagaaggtgagccaggttcttgttttagtatgggatcttccagaagacccacatgattaagataaagaatactttaatataatatcctcaacatggaaaataatgctaaaggtcctgaatttagagacgggtcagcattactatttcttctttgcttgggctaagctcatttcagaggaacattccagtgaggcaacttatttagtacacatctttgtccagctctcaatgtgtaattcctaagcagccgagcctagtctttgccttttacatactgaggtgggcctgatctggatcacagggctgcaggcccagtgttacagtcttgtcaaaggaggagctaagctatgctcaaggagcagtaacccctgtggccagtggtcttcaaataagagtccttagaggacaagtgagtcaccaaaaggattaatttgtgaagaaaaagccccaaagttacaacaggttgtctaaaagacaagggcgcaacacagacaaggcctcttttccttggcccttctttaccgagcagtgcgagtcattttccttgggtaagaaagcagagcttgtagatgggctttctccatgtcctggtagacgttacagccaccactggcacacgaagtgagcacagagatgtctgactttactctcttgttttactggcacaggttttagcaatgatgtgtctgtcagtttagcccaggtgatgctttgttgtagtggcctggtctgtgcaatgccactttctctccaaactacctgtttctgactcttagagcccccagcagcagtcgggggctcagaacatcatggtcattttgacagacccttgcccatactttcacccttctctatctgttcctaggccaaggcccagtcaagttgaaaggcccaacaggttctctccctgtccgctcttgtcttagccatgaaccctctcaaagaggaccctgctcgagacagccctagccgacctttctaccattagatcaccctgcccgagcaggccctcgtgtgctttagcattccaagttctttgccaagcacctctccttgcagtgtcactagggtgactggagcatgtggtttccaagcatgctctggtttctgacttgagtcgttactgacatgactctttctaaaatcctttccctcaaaatccaacaaccagaagtaattggtaaagtcaagtcattgactttaagaggaaaacaagaatggaagaattgctacatttggactggtttaaatacactagaagatgaattgtaacctttcattatgaaatatacaccccgccactgaaatgtctcgtaagaaaaatgaaaaggaactttagcactcaaatcctgtcttttggaagtgcagatctctcctaggtctttctatttacaactcaaggcagatacttagtagatgaaaagcagtcagactccctagaatggcacacagtatttgcttactcgccttagcaaaaatcaagatttattgcctttcaagataaattttgactaaatattgactttaggttctcaatcattgtttgcctgaaagaccaataaatcctgacatctctcaccatgagttggaatcgacagtatttattaatttatttcatgtagtttataattaaaacagtttttaacttataaattttaacttttatatggtagtgtttatctgcatgtatgttagtgcaccacctgttctcagggcctgttgtgcttagaagagggcatcagaggccctggagttggagttaggaatggttgtgaatcatcctgtgggagctgggaatcaaacctgagtccctgcaaggcaaaaatgctcttaactgctgttccatctttctagctcatgatttataatcttaataacaacattccacaagattggacaaatactgtagaatttaataaatttatattttcagtgagcagtaatcaatcatctgacatgtgatattcccttcatttcttaaatacagttcttacactactattagtacagtcaacatattgcacatcaaaactgattcagctttgaaatagtcaatacaaaaacctaccccccaactagaaaactcaagccaaatgaaagcctcacctaacggcttacagcatgcttgaaatttgtgatcctattcagacaagaaaaaaaaatccagtggctgacttttttggatgccatagttctgcagatcaatcaatcagtcaatacacaacgataacttgtaggtagcctgtgttttgatggttgctgtctgctggttccagtctcctcatctctcatataacagatacaatgggcacgaaactctttcagtgcatcgaggcacagtacaagtactttacaagtaacatttgtcacattgctgtgttgaatggaaaattccttggatcagtgcatgcatcccccgccctcccaaaggagttattcactcctgttatattcttaaggacatcgctgtgctagcaacagctgcagtccattctgcaagtgccaactcaagttaacctaagtgtgtcaaccatggtagggacagtttctttccaagcctaatttatgcttttgaacacgtgtcaggcctcagactgcacaacagaactttatgagccaagttctagccaataagtagtgacatttccctgtgtgtaatcttccagtgctgtaaacttgtagatgaacataaaatgaaatccaccagacaaaaattactctgtaataaacagaagagactttaggataggtttagaaacaattggtaaatatgttttagggttgcatttaagcctgtaaagcctctcccagctataaaggtaattttttaataaaatatttttcattattcattgacagttttatacatacatataaggtatcttggtcatagccctcccactcactctccttctcccccctccatggaccttccaactcattcccctcctgcctttatcttctctcccttctcttccctccttccctccttccctccttccctccttcctttcctttgtggctcagttgagtccagtttattagtactgtttgtgcccattgggtacagagccatccatccagcagagccagcgccatgaagaaaatggactctctttttcccaagcatccatcaactgccaaaaacctgtcagcaatgaatggttggtgctttgtgagtgcctcccctatccatactggaatgctgactggcttgatactgtgcaggtcttgtttatgcaaacccagctgctgctagtttctgagtacaatagccaggtcatctccagaagccagcattcagagcactcctccccatcctcggactcctgtgttctttccacctctcctttctgtgatggttctttagcctgggggttggggtgaggtattgatatagatggcccatttagggccgaatgctaagcagcacttattctcatcgtttccattagtttatgagtctttacactgtgttccactgcaaacagaagtttctctgactaaggttgagaacagcactagtctgtgagtataaacatatttagaagacagattgataacactagtaattaccaaaacaataataggtttcctcataggttccatgacctccctacccatagatttttgtttgtttgtcttttgttttttgttttgttttttgtttttgagacagggtttctctgtatagccctggctgtcctggaactcactctgtagaccaggctggccttgaactcagaaatccgcctgcctctgcctcccaagttctgggattaaaggcgtgcgccaccacacccggctcttttgggaggggggggaggtattnnnnnnnnnnnnnnnnnnnngggggggaggtattcagtaccaggcataaatttcctcttgtggccctggcctgaaatccaatcagaaagtgggtaatcaccccttgccataagagtcaggccacttgtatctcaggtattccgagcttctgggctaatatccgcttatcagtgagtgcataccatgtgtgttcttttgtgattgggttacctcactcaggatgataccctgcagatccatccatttgcctaagaatttcataaattcattgtttttaattgctgagtagtactccattgtgtaaatgtaccacattttctgtaaatattcctctgttgagggacatctgggctctttccagcttctggctattataaataaggttgctatgaacatattcgagcatgtgtctttattacatgttggagcatcttctggatatatgcccaggagtggtattgctgggtcttccagtagtactttgtccaattttctgaggaactgccacactgatttccagagtggttgtacaagcttgcaatcccaccatcaatggaggagtgttcttctttctccacatcctcaccagcatttgctgtcacctgagtttttgatcttagccattctgactggtgtgaggtggagtctcagggttgttttgatttgcatttccctgatgactaaggatgttgaacatttttttaggtgtttctcagccattcggtatttctcaggtgagaattctttgtttagctctactccccatttttaaatagggttacttgattttctggagtccatcttcttgagttctttatatatattggatattagtcccctatctgatttaggattggtaaagatcctttcccaatctgttggtggcctttttgtcttattgacagtgtcctttgccttacagaagctttgcaattttatgaggtcccatttgttaattcttgatcttacatcacaagccattggtgttctgttcaggaattttccccctgtacccatatctttgaggatcttccccactttctcttctattagattcagtgtatctggttttatgtgaaggtccttgatccacttgcacttgagctttgtacaagaagataagaatggattaatttgcattcttctaaatgctaactgccagttgtaccagcaccatttgttgaaaattctgtcttttttccactggatggttttagctcctttgtcaaagatcaagtgaccataggtgtgtgggttcatttctgggtcttcaattctattccatcggtctacttatctgtcgctataccagtaccatgacgtttttatcacaattactctgtagtaaagctttaggtcaggcatggtgattccaccagaggttcttttattgttgagaatagttttcgctattctgggttttttgttattccagatgagcttggaaattgctctttctaaatctatgaaattttgatggggattgcattaaagaggtagatagcttttggcaagatggccagttttactatattaatcctgccaatctggtacaagtcacaaaccgcatgaaactctagaataagaaagaccatagtgtggatatttctatccatcttagaagggggaaacaaaacacccatggaaggagttacagagacaatgtgtggagtagagactgaagaaatgaccatctagagactgactcacctggggatccatcccatttactatcaccaaatccagacactgttgtggatgccaacaagtgcttgctgagaagagcctgataatagctctctcctgagagactctgccagtgcctcacaagtacagaggtggatgctcacagccatccattggactgagcataggatccccaatgaagaaaggacccaaggagctgaaggggtttgcagcctcataggaggaacaacaatatgaactaaccagtacccccagagctcccagggactaaaccaccaaccaaagaaaacacatggtggaactcatggctccagctgcatatgcagcagaggatggcctagttggtcatcaatggaaggagaggcccttagtcctatataggctctatgccgcagtgtgggagaatgccagggccaggaagtgggagtgggtgggttagtgagcagagggagggggaagaggataggggaggggattattcagaggggaaaccaggaaaggggataacatttgaaatgtaaataaagaaaataatcaatttaaaaacaaaacaggccgctattgggccagtgagtacatcttgccttgcagatcagtattgtagtatgcaggactcagcactgggtaagactactgatggaacacaaatactcccacgccccaacagcctacagagtaccttgtggcactgtgaaagttagccagaaggaggacattttctagtcagtctagcaaccaaagtgtgtgatatctttagctatagggccttaccatttagtttgttatgttgaacaaccaaggacgttggcagtaacctgttttgttttggaagcatctgggagcaaccagctataaagttttcatgccctagaaagagaattcactactaaagtatttaaaaccttaggaaggatataaattgaaacctttgcagtctaaaatggatctataattttaaccatctcttcatattagtaattatagtggcaaaagattgagttttccttttgttccttagttttcagatgcttatgaatactgtttgtcttataacaaaccacatgaacatactcagtgttatgtgccatggtcttcatctaaatgttcagtgtcttaatgtgttctatggttaaaaagattccctcctctttgtgggttactgacttgttccagagacccagagataatttggatatttgagacaggaaaggggttgagtcagtgattgtatgtaggtgttttcagattcctttattctctgaaccctttttcattctgtaagtaggattgcaaagggtcatttctaccatgctaattgagctgtgttgggtagccactcctttctgctgtgcaggatacaatgctaaggctcatgtttgttttgcttcaactttatttaatgccagctttacattgaaaagattgctcatgcttatattagacagtccttcatttaaacactgcctttattttggctaatcccaggctggataaacaacatctcatttatgccaaatatagcagtttttttttttaagtatatattcaacacaaacttcttcttgttgtttgtttgtttttgggatagactcttactgtgtagccctagctgtcctggaactcattatgtagaccatgctgaactcacagagatctgcctcccaagtgctaggattaaaagcgtgcattactacatgtccagctcaacactgactcctaactagtagatggttatagacagtaagctagggaagccacgttgtttatggctttactcccaattctggacatttctttcttcagcacctgatgtagggtaggggtcagacccaggaccttcacccattctaatcaagggctcaaccacagaaccacatcactggtctttaccacccctaatacttgtacaataccaagtcattggacctctgcttcatttgggaaaaaatatagtctcaagaaagtccaggccttgaagccgcacagagctttttaacatagagcttgtttatggcagctcactggatcctgccaggacactgcagggaaagcaggatagagagcctgttccacagcctggtcgtggacattgcattctgtccaaagctatggaaaagaggctgctgggaaactcttcaaattcccgtctgcttttccctttctctcaatccctttttaaggcccgggtcttgtatatacatactcatgtgatcctcttgcttcagtcactggagtgttgggattacaaacaccatgatgtcttaggtaggcttttttatgtttttgtttttttctgtttttacagagaaaatgaaaatgtattctctttgtctcattcttcccttcctgttttagaagctagggtctctaaatgatagcccaggttagccttggactccttcctgatcctcctgccgcttcctcccaagtgctggaattacacaccaccaccctcaggcgttttctcttccctttttgcaaaagcacttacttctctttcatcttcttgttctatttcttattctttagggcatttctacctgctaaatataaagcaaaatactgccatgacctcatggaagtgtatgcatgctcatgttgcaggatagacagcggcttggaatagctagcacttccttggtgacatagcctcacctaggaatgggcccagcctcagctcttctccttccctggcaggcctctgggagccctggtctagggtaggcaacataagttgacatctattaagcaaggagaaggctgttggccgctgctcaagacctcagcctcaataactccatattgcagctggccaagctaagtaggtacatttgtgagaagaaagattgtgctttgtggaaaaggatgccagaatttctgttccaagcctagatagactcttttggatgtcttagtaaagactgtttgcgaaatgggctgtatatgcaccaaacagggttctgggtaaatggtaacatttgtttccaaaggagtattagggggagctaaactctcagagttgtgttcattaaagatgtgaagtggggtgggaagcaggggaaaaaggccagtgagctctcttgtgaaatacttttttgttcttatgaattgaacactctgaaaagtttcaaaaagaacctgggagaatgcgtttgctttgatctgacatgtagagtgtccccttccacaaatgcccttgaatttagaaagttattgaaaatctgtttgaaagtacataaaaatatatgtaaataagccctaattagttatttcaattaattattgtctgtctacttttcagctctattttcccccataatgttgcttttcagggtccacttttggcactcttgaaaaaaatgtttcttaacagtcatttttaagaaagcacacttttcccctgttgaaaaccacacacacacaatgataaattaaaatcccagattgtgcctgtttgtgaagaattgcttcagatgttttcagtccatgacctgcagtatgacagtgaaggaaatttcgctgtcaatcaacagagcagggtttccttcttgaaacaaatgataggtgctgcctggaagacaataactttatatcaggtcagtagcctcttatcttcctccggaccaccctgtctctttcaaaggaaagtacattgaaatcaaggctaaagagctttaattctctctcagctgagcaggaggcttcccggtagtactgagagctctggggatcgctgagtgtagagctcttgcagagcacgtgacgatcttcagttccatccatactatggggatacacacttctagactgggctcagggttcttttccacggtgaggtttagaaatttccatagtgatgaccaagaactggaactattagttttggaagacatgacaatataatttgcactgtcatttagagcttcaagggaccttagaggtctttgagaacccagggaaccagccccagcctttatccatcagagtccctggaaaggaagggaaacatgctcatgagaaatatggatttgggggtcctactccatctataccaaatcagaatcgtgttggggtgggttctacatttgccacaaacagctagaaaacttggatgctcactgaatttgactgtccgccgatcttagctatccagtttattttattatgaggaagtaggcctagagagttggatgggtcaggttcacagcatgccctggacaagagtgctcccccgtgctctagctcccagggctctggattagcacttctctgtgcaccaagtgttcaaagtagtctccagcatgcagacaggtgggaaacgacttaggactgaggggacagcacgatccacagaaagcagtgaaggctcaaggaccttcactcgggtaggagttacagtgttgcccacgtctaaactaaaaccccagagagccttagctgcgttctctcagccctcttccttaccttctgtgagctcagaaacctgtgtggagctctgagagtgctgagcttgtctcagtggcacatgtagttgaatatccacttagggcctgtgtgcccagttgaaataataaacaagtttagactatatgttttcttatgcatatttctgcatgcaaatttgtttcttaaaatgttgcatatatatgttataggacattgtagtaaagtcattaaaattacagaccggcaagcctattaatatctattagtatctaggagatgcttactagtatttaatatacaccaaacaattggaatcccaaacttacctaattaatttttacagttttctgtggtgggaatttgcctgtagcgatgatcctgattgtgttgcaaggtcagtcacctcctaatccattaggaagatcaaattctgttctgcttactgctctaaggtgtaagtgggacttgggagaatggagctgataaataaggcagactaaagtctcatacaatagccaactctattcagagcatcagacaacttatatggaaaaacatggttttccatagaggcatagaagtaaatgacaatagccatttgtaatggtaatctgaagtaaacccttcctatccactacacctgggaagagtaaacaaacactgtctaagaacaagtccagggttataaagaaactcgggccacaagtttgtgtcttggtttcttggagttttctcaaagcactcagaagtcttctcacacattcttgattgtgctctgccactatgtgttttcagtgtttactcagtttgactgtctgctaattatcaggagcaggaacgggctttagaataggcaccacattttaataggaataggaatgaaagcaggctatttgaggaggcaggcaacaaggttcaaaggatcaattttggggaggggtataggaaatcagtcctttatatgtaggtgtgttgtatgtgccagagggttcctagttctgcccaggactatcgtgccttgacacaaacatttattggttgtctactatgtgttaaactctctgttaagtgctgaggttaaaaaaatatatctgagaagtttacagtctgccttgctggagaggcccataaaaatgcatcacagttgaggaggcatgtgctcaatgccaggtgaataaagtgcagcaagaagcatcctggtttactccccaggacgcgacagcatctcctccagcagatagacgctcctgtggccctcatcatctgcccagagtttctcattccttggccagcctcaaaagtgggcccatcatgattctgttgctactcagaagttaagaaaggataataattttaagaactacaagaagtggggggggggagtgggggacttttgggatagcattggaaatgtaaatgaagaaaatacctaattttaaaaaaaggaaaaaaaaaaaacctaggagaagatctacttattggagtatgccactaggaattttatgttttagtcctctctgctgatagaaacaggattaagttctcagcacaaggatgtcccgtgaaatggaatggcgattaatggcatcttatttgtgatggaaacttttagctttgtggaattctcacagaatttatgtggatctttgtaggtaggcagtttgtattaaataaatgtggttttgtaacggtcgtgggtttttaacactgattgccacattatccatcatcgcagtcatcatcatcactggaggagtagctcagttttatacttaggtcatgaacttgtgtcagatctctctctatttctgacacccagccgtgaggagtgccacctcatgggaaggagttctacagtgagagatgtaaagacacctcagaatagcgatgctgcttgcatagtattcatcagccttgctgggtctctgaggggtaggatgcttgtgccagggtttctgtgttaataacaggaaaccaaggcaacctggtgtctttgggagcagggccctggttattgccaggtgccctgacagtgcctggacaatgcttatagaatcaggaaacccccaggagaggaaaagggcactaacggtcagttccctaccagcagccagtggccttggtagctggcaaggcttgttgaggcagcaagcactgaaggcattgggagaagctgccgtgtctgctgtgttgagggtgcagagagcacactgggtttacccggtggatgtggaaagctcttgggctggaataagtaggttatgtatccaaaggagaggcataggaaggagcgctgcaaaggtagagccagtcaaatccagactccttacactgacatttttcaagcaaagaaatgctgtgtgtcggtttgcggtcatgtcgtcactagaccagctgacaccagatccaagctctacctttgatttgctgagtaatctctcataacacatttcacatcgaaaagtccttcctttcttcctctctctatccctaccttccttccttttcttccttttattgttttaatttttgtcttggtttagttttgattttctttttgtggacaaaatgtcaagtcacataggctaacctcaaacttgatatatagccaaaatgacctttaacttctgatcctcttccctctgcctttgaaatgtctctagatgcgtgtgccaccatatcacagttttatgctttgctgagggttgaacttagggcttcttctatgctcggcaagtttgtcacccgctgagctatatccctagctcctggtcttgtttctttgagaccggagctagctacgttgcccaggctgcttggaactctggatcttaccatgtaactgacactggtcttgaaccccagatctgtgccccaggttctgggactgcaggggtagaccatatccctggctccaggtttttcatcagtaaaaagaggtctcttttctcagagatgtgtgtaagccaaacaaacctatattagaagctcctggctaaatatgtagtatgaattagtttctgaagaagaaggtgataaaataaaggtagcgttgtggagaaactgctccctgggagccatgtgcagaagaaactgaatcagagaagactaaggacaaggttctagttaggtgacacagtgtctgttcttcaggaggtcaagactctcaggcttggaaggaggggacacatgggtccatgtgctgtctgcagcttttctttgctacaggcgccattgaacttaagggttgtaagcctcagcagtaatagtctgtcttttgccttgaacagggtgccagcgatctattggtctctctaacggaaaggccaaggtgtgcaattatagcgggtggtactactgcagcagctgccatgtggacgacagctttctcatcccagcacgcatagttcacaactgggacacctcaaaatacaaggtaggtgccaaccttgggtacacttaatggtggcaatttgggtgtttgtatattgtcaggtggattttaaagataacagaggcaaatttgattagatagtattataaaaacaaaacaaaaataaaaaacaggatctcacgttgtagttcagattggccccaaatttacattccccctgtctctagttgacagagttgagctgacaagacacatcccatccatccatcatgcccaattgtaccaccagactttatctaatgcttcttacccatctcactgtttaaagagttttttaattatgattcttaatttctttctctctttctttctctctttctttctttctttctttctttctttctttctttctttctttcttccttcattttggggggaggggtttcaagacagggtttctctgtgtagccctggctgtcctggaactcactctgtagaccaggctggcctcgaactcagaaatccgcctgcctctgcctcccaagtgctgggattaaaagcgtgtgccaccactgcccagctgattcttaatttcttaattttaaaatatatgtatatcttttgatctatttatctgtctatataagtttttgcctctaggtcttgataattaactataggtgttaagagaattctgtaaagttggaggcctctcttggatttttattagaaaatgaagactgaacatgcctctgatctctggagaagacatttgtgacccaaagtatttcttgtgatcaaatagcactgattcaggtgaaggccagccagtcttcaagcacgttcagcccttggaactggaattctaggagaagccatgaggacttctgagtagcagtcccctgaaggaagagtacagttagtgatcctcaagcccttagcagagctcctgtttattaaagaatgggagctcatgggaaatgttgggataagctaagagctttgcacaataatgactagcagataagggagacacccaactaatatgaatagcacagttgttagctgtaaaatgtaagtcaacaggggaagaggaacactcaagacatgttgggtcatcctgatgtaagagggtagagagaagaggggcagcaaagggtagcaggagaccagcggtgaatgagcagtgaggtagaaggagcccaggcaacctgacaagccatgtgaagaaagcgcttccagatgaactgtgacagatgctgataggtcacgaaagatgagccctgaggactgaccattggcttcagtcatgtggaggtaattagaaaccctaatgagagcagactgaatggaaaggcaggagctgagtgaggtctgactggagcgggctcagcatagaataggaagaaagaaagaaatgacaagaataggagaagttttactcagaagggaagaagactatggggagggactcaaaggggagcggggtcagttgggtttgactttttgttttaatagaaaaaaataatagcatgttggtttttttaagctggtgtgaactccccaggaaagaggagagagtctggaataatgaagttgagagggagaatggcatcctgtagacagcaggggagttggccagtggctgaaccacagaatgagagaaaggagtctgagattgtgggacgggttggaagctcatggaagttctttctgtttgcaccagtggttttggtcagatttcttggtttcgatatgtgtgatttttaagagattgagtttccatctgggtttctctggaaactctctcctgctaataaggaaaactggctgataaggaaacagctccatcagcttacctgcaggcttctctgagccgcatggtcctcagccatactcctcttacagaaggtttattcttctgctccagtgtcagccttagccctcttttccccatcatggttttaccaactctggtggattggtgttaattagacatctctccaaagaatgcctcagccctgtctcgagtgtttggttagtgggagacaaattccttgaactctcccaagcttcagtttgctaatatataaaatgagcccagcctgtctaggttcaagtcttggctttgtcgcttactggcgtgtgacctgggtaagttatttaggctctcagtgttttagttttcttgtttaaaagatgaggataatatcaccttaaatattcccactggttgaatggctgacatatgtgaagatagtagactggtgcccagcacacgtaagcactgtgctttttttgtaatgcacacatttatacttgagagttgtgtggagtaggttattaaaagaaaaacacaaaaaggttggtgacttgagctctctcagggaccccgtcctcttgtttgagggctagatagatggctcagtggttaagaatgtttaatattcttgcagaggacctgagttcagttcgcagcacccaagtcagacagtttacagctgcctgtaactctagctccaggggacatgacaccttttctggaccccttgggcacctacactcacacgtgtacattcttccacacagacatttaattacagtgttgttggtgatggtggtggtagtagtttttagtttagtttaaaaagaaaagcactaccaatgggctggagagatggcctagctagactcacaatcaaaaatgtaagaaatggtgtgatcagtacttacagaatgggagttagtactctcatctccaccttatttatataattaattgcctgctatgtgttttctctgtgagggtgggctgaggagagaggtgtggcttagcacaattggtgacacacaccaactatgtaaacagaagtggctgtgaatgaccgagagtgaagcctatcccatgggcacctcagactcaacactccctacattctccatggccttcatcatactcaccaaatgcatactgcctgcaattgcagatggagatattcatagtcgtacgaatggccccatatctccactgccaagcatagaagacatccttgattattccctctaccagtgtgggaatggtacatgtgtcctggcaatacaagaaccaagacttaattttaacttgaggtcatgctctcagccccactacacacatgctctgaggactacacacatgttctcaggagcagtcacacagaagttggctgccttctagtggtacttcttcccttacttctggtcctaatggtctttacctcaggtgcatttcctactcagccatgtcttattttttcatcttacaatagaggtaatagtaatatgccataacgctgctctttacttgcattagtcacagaagggcctagcacagtgtccagtgtattataagtgctcaattagtgccagacctccccataactctcttcagaattagtacagttccctttgcaatctctagtccctctctggttccctttccacatccattcccactagtctcttccttcctagatagaaaatcccttctatccttttgaatccctattctaccagcctggctcacatctcttggctttcttttgccctcacctagcccagcaaatcctaaaacctgacttgaactttattttctcccctaattctttccttcctctcctagacagttatcatggcctccttctgtatcttgtacttgacacttccaatatagactataagtatattattcgtgtgtgtatgagataaaaacatatgtagggaggcaggctggctgagttcactttacattaatatgcttggagcagagctttaacagctaacactgagagaggtagacctggccctgtggttctctgaaagcagaatgcctattagtcaatggagcaaaagtaaaaaggaggcactgacagcaaatagccaatgcatgcatagttcttgagggccatggctgttcacagagagctctaaagactgcagaaactaccagtctagctggtgctgaaggctgggatctttctgtaagatgggccatcttgtagtggtccttaaataactagacttgatttgagggaataggtagctcattaaagatatttattaggtacactcacttcattcacgctgcacatgaggagtcagatctctgcttcccacattctcagtggaccagggacaattttactgcaggaacacagccagttgattttatctggatcatctgtcactggcattgaggaactatattccatttagtccagcatctgtctatctttgctcagataccaggaattagcttaatgctcttaattgtgaggatcaatttagacatatcagtttctaaatccagacatcgttctgttagatctgcctactgtccttaatagcaactacgtgactgcttgactacccgttgaaaaaatggttttgcagagcagagtgaaactgtcttctttagcatttcctggctgccctctggagtatcagtaattgtaattactttcaaaagcaggattgcatccatttctggtgtttgtgctacggactgaactgggcttcatggttggaggagttaaacctatccttaaattctatagccattttctaatgaaattctctttgaaggtaacttttctgctccccattcagaccaatcagacacaattcaaaatactcaactctcctaccatttccccatagttatgctttaaagaatgttttgtgtggtcctagcctgaatattcacattccatttagttaggggttttccatgttacacaagcctatctctccatcttgagaggcattcaagacaaactgttgcctctagctgcctttcctctttcttcattattgactctaactgtgtttaaacttagaaataaaaccaaactgttaaaattgtgtctgaagtaagtgtggttcaaagggaacgtgggtcctgccctcatggatacttttacttcagtggagtgggcaagatattaaacaactacataaatacaaaactgactttggacatgaaatacttctgcatgtttgtcattgttttagagtagagctcaaatgtgagcgtacatgccagcacagcctaattgcatcatagtctgtctctgtttgcagcctacctgccttctgacaggaaagaaggatggaggagggacagggagcacttcttttatagaacagtgagcagataagttatggcagagtaattaaaaactaaaggaactgtgactacagactatagaccacagagcagcagtgtccagagttctgagtcctggttccactctgccatgacatgaccataaataagtcatctggggtctctagacttgagtaaatacagacaatgaattaattcactgtttttcaaagtggattctgtgcaatactcacaagtttggcacttgtgagtagggctctgttggaaggctaccatcttggtgaggattggaaagagccaatgagtttacagcttggtaagaggagacagtgaagtcagagaaggttgttctgcttccagttgatgagtggagcatagatcagcctttctcccattcttctgcccacaacacgactggaaccacacaaagccgtctatactgaagtagactggagaaggagatgggttaggcaggtaatccttaaactgtcctgtccatactgaaataggcttgaggagcggatatgttaagtagggaatcctttccccctctcctcgtcttccccttcccttcttattcctcctctccccattcttcctcccctccttgtcattactgttgagctccattcttaacctaacccaagcaagtgtctagagtttggatatgagaacgtgtttcattttgaatcaccgagaaagtgctatgtagtctatttattttcctaacaccgaagaaatcttttctgtgggactagtaatcctgggaatatagattgagaaaaactgactagattcttttttcctttccttgttatgctaagatcatgccctcctatgttttctctggccttttcctcctttaataaaccggggtccttagcacccctgcatcactctcaaattgcacctgtggttgactgtttatttcctttgcccattacttctttacccagcgctgttttgtgggtgaacatgccaggacagtattccagaatcctctctcagaattatgcaaacccgagcaacatccagtaattgtacagttaagaggtagttgttacattatgacaacatgcatgctgtgttcaaatctgcaactattacacttagcgttcagattacttgtgctcatttgtcagtgcatgtgcgcactcacagatttagtaaccattagtttgtaactaatttcattgggattgtgctgtcctttctaattctccttattgtgatgaggaggggacatgtttctacttgggcttctttcctcttaagtcatgtatactgcagggctgtgaaggcagggtcagctcacacacctcaagagctcaaggaatcagaaacctaagcacagtgctgatgttgagcccctgtgacataaactgttctgtttatgcagtacaagagcaatgagaccaggtatagtagtgcatatgtctaacccggtgttctaggccagtctaggctagcccatagttcatactacaatccacaaaaccaacagtgaaaggagaaaagtcagacctgaaagttgtcctctgaccttcactggtaagatatggcatgaaaatgttgtcgtcccaccccgccaatcatccacagctgcatactcacacaataatgataaataaataatgcagagcactctggcatttttggttttcatgttttggttcgtaagggcagtagctcagctacttattgggacacacctggtgttaaactgtgactccatgtttagattagcagaagaagaaactcctacccaagaacaccattgacgtcttctattaggttactaagagtatagcttcttccttaggccaattctcatttagaagttcttctttttggaaagagcttttttatgatagaggatttgagtgttaaatcatcttgccaataaagggaggaaaactttgagagcccaaggaatcagaaggagattaattatgaagctctgttttgcatttatttcgtgccagattgcaagttttcctaaaacctaccttactagtctttgtgaatggaatggaaatcaaagcaatctgggctctgaagacttcaaccatgagctcagccttgttgccaaaaatggctgcagcagccagggatgtgttcacacacccaagcagccagggatgcactctgtgggaggagagcgcactaataaattgggaaggcagtgccttgcctttactgaagccagctctgtttctctttttcctcatattagtttatgaacgctgctatcagtagctgctgtcctattagtgtccctgcttttactgtctctgtaaaagattttttttccccccctttgctttcgggcttaagtagcacctgaagagagaagccttttaaggcctgggagactggccagtgccctttgtccttctgttcacctactaaaaggtagcattgttaacctaattcagcagggccctgactcagtataaacactgttctgtaccccaggaagactaattgaattgcacaatacatcattttttagcaacagtttcaagtggattgtacttcacttccctggacaccatcaggcttgttttcatcattgaaaatatataagtgcagctgatagttaaacacagtaaatacaacatgtaactcagtattgtctttctgcatggagctggagccgagaggagcctgaggacagggccatagctgctttgttcttcacagaaagcccagcctgctatgctgtgtggcatgtgctcctgtcttggcttcacagatgagaggagaggctcctgcactctggtaccttgttgtttctgatctggtaaagcagctaaagatcttggctaattctggagctgcttggagcctggattttccgtctattaagctcctttaactttgtcgctctgcaggacatcatagggatagaccacacaacagatatctcagaaataattgcttataagcatgtgcatgcgcgcgcgcgcgcacacacacacacacacacacacacactttaagaaatgatgcacttccatagccctgaaggaaatgtaaacttagatgggagctttccactttgagaagatggtgatcctgaacatgctgattgtgtgtaagtagtagacttttaataagtgcataagagcctcacatctgatagtcacactcccatagtgtatgttgagggacttagtggttttgtcaggctgtggttccctcctcacacttccctggccactctgtccatcagatgagcttccacttataattccagacctagatcagtgtggattgcttccccaggcctgcctggctccttgccccttccccaggaaagctgattcccctcaccgagcttcctgtgagccctctgtgagagcaggctgcatgtggttttgttttgagtcgttatctttcctactaaatagccacatgagggtagggcttgtgttctcctccttggtaagctgttgctgtggggcggaaagcatcgtggctttgcagttttcttctcaatgaacaaatgtttatgttagtgcgggatcccagccttgcttctggagacagttattggggacttgtggagaggcttactttccatcagcggaggctgagccagctctctatgacactggcagattccatctgagactcagcaaacaggcctggagagttcagtcacacacacacacacacacacacacacacacacacacacacacacacacacacatatatccgtgtttacatatttatacagtttttaaagactatgagggttttcgtttggttggttttggttttggttttttgtgagttgcttgtttgtttgtgtctttttggcatattgcttgaaataattacagagctgtagcaagttgaagagacagggaacatttgagtatctttcaccaagtttccttcttggtcacatccaccttagtccatcacagtaggatatataacagtaagcatgtcagaagcatgatatataacagtaagcatgtcagaagcatgacatatctgtgaggtctgtgccatcgcaggtaaaggcttatttaatcactaacatgaactgtggagttgatgaattccttccacatttgccagttgagcttctagaggtaagaagagaagctatacagtgttcagctcttcagtggacctcttcccttagcagtgaccagcagcactacgttcgttgtcactgtgtggtttctaggcaaagcagacagatgtggaaggctgggtgactcgccagtgctgacagccagggcttgtttcgcaggtatccaagcaggccaaggagtttctggagtatgtgtacgaagaacctctgatcgacatccagcaggagaaccccatgctgtacctccatgctgagccactggccaccgttgtacggcttcgacagcggttgaagtcactccgggcctatttgttcagctgccgggcagcagtggcggaggatctgcgccgcaggtaagtcatcaaatgccagctcaggaagctggtcaggtgccccctgagcccctttccaaggtagcccttctccagtctttatgtctcccgccaccaccagaccacctctgtccgtggctcatttcaatttctcctttgtccccagtcagttgaaccaagcaaaagtgagcaccactgctcagccttccctgccagtgtgttaccctaaccctgtggggtttcacagaccatgtaggcaggggttagtacttctctaggttttacttgttgcttatacgtaagcaggagcaggcctgaaatatttcacaactgaaaagtactttaatgggaaaaaatgcaaatgactattcaaatcttttctttttctgtaccaaaacatatactaacttgataactgctgcaggaggaaagcatggcactaaagcacacagcccaggcgtttgcctttcaccttgcgcttggtgcaggctgctctcttcctgtaactgagtcagttcatagttcacagaacacacaaaaccaagccaaactcagatccttaaaatgcagttcaaatgtgctcgctcttacaaaattccttattttacagttgtttattatgagcagttaaattctcacctttggcatatacgaaccagtttatacttgaagtaattgttggtggcttgcataagtccctgaaataccttttgattttttttcattttaatagaaatgaccatcagcatatattaatcatagtaaatgtttctggaagcccacctggataagagcctttggaaagaatcaaaacaatagagtttacaacttcaaattcagttagatccaaagaaactgacatgaccccaggcatctgaagaagacattctagaaagcattaactataggtagtgaaaggtacatgctatgcaaatgagctcttatgaaataataatgaagaagcagatcatggagcagagtgctttccacccagtcacctagatgtttttcttgaaagcagtagagactttccttcatagaagctagacagattttaatttagaagctcagaactttcctgggggcctaagggtggctcagcagtcaaaagcacttacttgtgttccagagggtttgactcatccaacatggcagctgacaactttctgtaaccccacttccaggccatcctatgccctcttctgatgggctgttcacgcacatggtgtccatgcatgcaaaacatccatactcattaattaaaaaataaatacatctcaaaaatttctcaggactgtccttgaaggacagttgaattctatggttccaattcatttagcaactgaattagatagaagcagcatttcttttagccctcaaaatattctcatttgctacttcagtacttctggatttgttcagagcttgtgttccttgtgcctgtagttgtggatgatatgaaaagctacacatgggaatcctattggatacctttccattataatatttagctttggctaaagtatcccaaatacggcatgcacttggaagttaaatagaagggccctcctcttatggatgcctggcattctccactccagcaggctcgtggtttgccaccatgtactatgccttatagccagaccagcaagaaagaagtggaagtttagggcaaaggccttaagaggctagtcccacagccacgggaaggaagacagcagtcctcttccctttcttcatttttgtcttacagacttgctcccagccatgacataaagcaatgcatagcattctgagggctggaaggacagtcagggaaggaggagaagcacacatgggtattcatgccagttgagaccactgaacagtgactgaaaccagtcacctactaagagtgaggaagatgctttctagttcgtttctccttgattccctgtttgtcccttatccacctgtccaggcctacaaagagtttgaatggataaataaaaaaaaataactggtcaaatgagtcaaaatattcagtcaggcatgtctcttgggaaggccaggctaccctaaggcatacagtactgtttttacttaagtcttttacctttctgcttgcatcaatcttgaagccttttcttgataaactccaattttgctacattgaaacatgtgtagtgcagtttctgagataactgttaaatctttcctctcccagaactgcttaagaacctttataaccagtctagccaacatcactcttcccctctcccgtcaagcctttacattaggtgagttattaaagttcatataaggggttcaaagtttgcccagtgtagctgagtgtattgttctactttctctcataccctgtacttcaaacaaagactattgtttaactcaggttagtcacagtagtgggaatggaacacgtttgcaaaactgaagcattcacaacagtgctggtccataggcgctcagtatagtattattgttattaatagtgctttcatatcacattgttcttacatctgacttcaaagacctttgataaaatgttctacttaaaagccagccctgatgttctctctgtcagaactaatgcagttctgctgctgtctgaggagagaggcacacagggaagtgttgtaggaagaagctacctggtgtccaagcacgccggacgcatctgagtgcaagcagtgagatactgtgtcctagcgggccttacaagaagcccattcttccttgtttagttttcattttcttagattctctacacgtaggtatgtgaagatgatgttggggttagtgcatgcctgaatcccaggacttaagtcggtggaagtaaaaagatcagagttcaaggttatctttggctatgttgtatattccaggccagtctgggctaccagagattctgtcacaataaagtgcaataaaaataagtaaactagtatttggtgactgggtgatgaggcacacactaataatcctgcatttatgaggctaagggaataaataatctgtagcacagagtcaaagccattctgtgctacgtagagagagtgaggtccaccaggctgtattgcaagaccacgtctaaacaaacaaacaaacaaacaaacagaaaaagcagggtggccaaatgggtagaggcacttatttctaagtctgataacctgattttgatccccagaacctacatggtaaagcagagaaccagaacctacaaacttgttcttacacttccaggctcccacggcacaaacgtgtgtgcacagacacacatatacatgaagtgaattaaaaaccaaaaggaaaaagataagtacactagggataaatagtatgctcacagctttctttttataagggagggtatgtggacagggttggtccttttatagtatttcaaatctttgtgaccttgctgaaatatgactgtttaatgcaataatctctcagactttctgaggtgacaatacttcctacagtaacctgaatataattccaactctgttgtcttctgtgtgtgtaagcacagctgtagtcatgattattacctatgccacatgctaaaattcccatttccagagccactttacacctgtcctttcatttttatagaaatgagatttttataacaaaatgaaccaacaatatctttcatgatgccaagctcactcacagcatgcattttaggttccttttttgagcagaggatagagcatctcagggcaggggaaaggcactgaaccagttcgaggagatgagtacccttagacagagggaggtgccaatgggcaacagggcaacaacaacaaaaatagcagaggatgcggttcctaactagttacaaaaggcattttcttcctgcctggttttacctcagaatgagagtggtcattaatcaccagcaagtaggcccaacatgctgaagacctgtcagcaccatataaacagagtaaagcaaactgttaatattgctgtcgcgagaaaactggaaacagactgattaatcgtattggcgcttgaccgccagcgagccagcgtgggtctctgccttattagggaagtcacagtttgcttttaggcccttgttattgtgactgtacggttttcatcctcactggtcttgttattgttgtttaatggatttcttgttcttgaatctctgctgcaaatcttgactggcagcactgattagtttagaaagagtcggtgtcttcatgaagcctgaaatgtttacagtgctgacagttccctgtttctgacgactcccagatggtgacccaccctgccgaagtagctaaggccttgttaactttttttgttagaagagttatttatcgtgtccacacatgatggtgtgtgaagaactctgggaaatctcggcagtgtcaggaagtgtgggatcagtagccattaagggacatgcttttgagggacataaagaagaattgcctacatgctcagctaaactcaggtcttggaggatgggtgtgaatcagaagtaccaagagaggtgcctcaaaaataaacttgaccaacagacctgttctatttggccttacagggatggctctgctaagctctgaaatggcatatttaaagaaggagttgcccatataatgcacacatgtgcacacatacacagagagatgcacacagttgggcatggtattgtgcttctgtagtccagaaaatcctagggaagacgacacacgtcagagccaagagaatccttggaagctcacaggccagccagcctggcatatggcagaagagaataacagacaggaggcctcctcatcccccttccccaaagagaaagggggaagaactttttaccctaggttgatacttcaggtttcctgtggcctttaaagacacatgctccatgatacacatgtcatccttactgtctgtacttggaacttcacctggaaactttgctttaagattcactaggagatggttacaggcttcctttactttttgttcctgtcacccgttgggtctggcttctcatcacctgtttttctagtttgctaactgggactcctgtctgccctgggtcccctgactagtccagattacagccattcagccatagagtagactgactagactgcagcatatcatagcacgcctggttggccatctgatacctgtgacctggccataacctacatgtatagcttcatctttcacttggcacttggtgggtcgtagacaccccagtcaaaatcaaatgttcatttccttgataaaccatccaccgctcccacctacaggccactctaactctaggtgacctcagacgcttcctcttcttgtcttcgttcagtgatatcttccaacagtgatcatctggaccactcagttgatgcttaggtgcctgggtgacttacatctcttcaggctcctttcctatcttgctgactcctggaaggctctgagaggacaagattcttctgctctgtcttggagactaagatagaagtgtgcatcagttggttgtacaacaagagcttatgaatcattaaagttatgtcatctcatgtttttcagaattatttacaattattgggatttttatccataagagggactttcccagaaatctatatttttctttctagcagtctttgaggcacacaggtcaaaggaggaaaggacagagccagagaggctctctgacttgccaacagtgaaaggctggtgagcagcagagtccaactggagccatgttttctcatcgtagatcactgcttcttgcctaatgaatgatagtgatgtctggaggtctccatactctcttaccatgtgttttagacaaggcctttctatgtggctggctcactgtgtagactagactgaccttgaactggtagtcacccacctgccactgcctcccagatgtttacagtcactccaggctcatgctcctgagaggactctctttcatgcctcctgaagacttgattgaggtcctttagaagagtgtgaagaaagatgaagaggtagatgggaggtaagatggctggctggtccaggcctgggatcggcaacaggcagtcgttcctggggggccaggcaggacaactggcttagtgccagcaaatgctttttctataggtcacagtttgccagacctttctattttccagacctagatacttaaaatagaagtatagcagtatccacagggttgcttcaagtgtacctctagccaaaacagatactaaaaactaattattatttctcactaccatttcatataagaatatagtaatactaaaaaaacacaaaggcaaacagcctcagaagtcaaacacattttaaaaagaaaatcaattttaaaagctttctagtgtatctgtcgccctcaccccaccccattttaccttagaccaccaaacacatcaccaactgttggacaagcttttcttaaatcctatgtttctcttgtgagcgctcgaatctttgggttctgggaattttgcatggctgcttgagtatttcccataatcccgtgtgagttgggtcttgatatgtctagtaaatctgaatggccactgtgaagtaaacctgaactgttctttcccgtgctgcttgggggcaatctacactctcaagcctgtgttcctggtgactcagcagtgctgggtcatgtgtcaggaaaggaagttaggcctattgttttaagttccctctctgactggttgttctgcagcagcacactgacttgactttcgccttcttcctaattctccttttcctgtttcacattttatttgaatggtgagtatatccagggtgagttcccactgaaatgttagttttgctaagcaatgggctctttctgtcatgaagattgccatttttattaacattatcccgtcaaactcgtatcttggccccttactgttttacccagagctactctgcttttctagtgaggtcactgaagtgtgaagctaagtgcagctggtgaaggggtcttttcacttttaatatcatctcaagtttacctacgtccaaaccaagctcataaaatctctgtcccacctcctattgcagactacccgcttcctatatcacttaagaacacctctgttccaagccatacaccttcctcttggcagactgacagcttcaacctcaaaccatgtctcctctttccactgtcagtgctaccaccaaggtccaaggctcggtagtgttcttctggactattgcagtcactggtcccctgcggcagtctgttcttaggattctggctgcagctaatgtgcagattagatgatgtcacttctggcccaactgatgtaataactttacctttcactccgagtcgaagccaaagctgtgcacagtcttatccccattagtctctgtctcacctcccaccacttcctgcctctgttccagtcacactggcctttctgctggtccttgatcatactaagagggctcctgcctgagtttctataccacctgcttgttcttctaggtctttatgcagccatctctttatagaaccatgcccgactgtattttaaattacaaccagtatgcaacttaatatccctgcctcctcctccacccttccctcctgtcttctttcattgcctattcatagatggcatggtatggtgttttgtctgtctccctgtcttaaagtacaaagttgtcctttgttccatgtatacttctgctctttccctcttacactggatcatagttttttatctgtattgctcactgctgtatccccagggcctggaacagcgcctgatacagagtggagactaataaatacttgttggataagttcattaagcagataaactattgttactaagattttggcaacttcatttggtcaaactgggttttgcttaatacaatatatatgattcattgtagaaaaataaaataaaacagcacctactattctgagcttgttttctagatttttctctctgtaaatgcttctttctcattaaaatggttgcgggtgtgttgtttgtcatgtaattatgtcacttagttgtacaccttgtggagacagggtctcagtctgaactcagattggcactaaagtcatgacagtcttcctgttttggccactcagacctgggagaagaggtctgaggtactgtgcctacgtgatgtcagtaaatgtttaaaaagatcatgaattactgagcaaaactgcaattttgttgtgttggtagatgtaaaataataataatattaagcaatacactcaatgagagtcatagcaaataacgagatggtaaaacatcttcatccagaagccgggaagatggcttagtgagcagagagcttgctctatgccacaggaggctgtatgtggcgccccagcacccatggaagagccgacatgacatatgtgtctgtaactccagtgttggagggtgaaggccggagaatcctgaggctcactggcccgccagcccagcatgcagagctacaggttcagtgagagagcctgtctcaaactaaggttgaaatagtgtcagcctttggtgcccaatcacacaaacatgaatggacacagacatacacacacacagacacacacacacacacacacacacacacacacagattacttgctgtgtctctgatctcaagagtattttgcctcaaaaatatgaggtctaagtgtgtaaaatatggttaatattgaattttagaagaataaacctctttagcagtagtattacagtgaagtgtgtgtgtgtgtgtgtgtgtgtgcacgtgcttgtccatattcccatgctgcagtgcctgtgtgaagatgtggtttctcctactaccttgtgagatttgggaagcaggggtgaagctgcagttatccgctggacacagcacttctaccaggtgagccctctcacaggcccaatattcccccaaaataaaatcaataaagatcagtcatttattaatatttaacgtgtattaatagcacttctttatgctcggtaaatgaatatgacttttatttttgttttctggaatatttattagccaggcttttatggctagtttcaacttagttaatttaaactgtcactagctaaagttaggctatagtcttaacagaccagctgcacaaatttaccagggctcagaaaatataacatataaatgctattttgataatgtttgaaagcaactgtccttagattgaatcataaatgatttttcttttgaaccaactctagaaatatcatttgtaaattatctgcctgcctgctctcctgtcatgcctcccttccttcactttctccagaggtctcattcagccagaaatatattaggtagctatcttatatataaatacaaaccaataccataaatctaagatggagctagaggctgcctgcgaccctgccatcctgcagtaagcacattagtaagctttgaggaaggagtgctgtgaaggcgtatactaattgtactaaactatacacacacagctcttgactgaaaaatgctttaaaacgttaggaagtgatctggtctctttctaaaataaaatatatcattacctaaaaacaatttggaacattgtattaaaagtccgacattcttgttcttatttcaactactttaggaatttaagctgggatttataaaagggatgtgtgatctgtcactgttatgccaggccccagaataatcacagcccaaattacttcccaggcattgctactcctgtcttcagattgtcactaagtagcttacacacactttctgaatgacctggtaaggaaacccttatttcttgtgactatctactcagatataataccttgtgcaagcttgccactttttcaaccaatgagattagcaaaatgaggcatctagagaaatgattgaagctcatttcttcagtgtgggttctcatcgaaatacctgcctttgatttcaaattgtttttccattagctcggagcatggctggatgcatgagccctctccatacccagcctaatgtaactatttcctgagcatctgcagctcagatcactaacaccaaattgctcttcctgggacgcctcacagtgctttttcagatttcgatgtgggtgcaaagtcacaatggctcttgcaactcagtacaaattacctaccctggatcacatatttctgaaaaacgcagtagtaatatatgaataaatggttttctttgtaaattatcctttactcacctctacttattttctttcagacccttattattcagaatcaattccagagatcctcattcggcattatcttttttattatgcatatgaatatgtatgttgtaattttttcctttaaagtctgtttaaactgaaataattgcattcaacacccttcactttaattgtgtgtgtgtgtgtgtgtgtgtgtgtgtgtgtgtgtatgcctgtatacatatatgtgtgtatgtgtgcacatgcatatgcaggccagaagccagcctagggtcttgttccttgggaaccatgcaccttgtgttttgaaacacagtctctcactggcctgaggctcacgatttggctaggctagctgacagtggactctagggatcttcctgtctctaccacccacagcactggaagtacttgcaactgcatctgacattaaaaaaaatttttttttatgtttttgatagtgccatacatgtatatgctgaatttaagtaatttttatcccattacattctctcattgaaaactcccttcttctccaaaagccccccttccactttcacgtctttgtgtgagacccctgagtttaattggggttgcttgaaggagaatgggtgggaagttatttactagaacatgggcaacttaagggtggctacactgctaaagaaagtttcacccctcccccagctgctgttaattgttaggagttctacgctagagagaggcttagagttaagagagcgcactgcctccttgggctccacttcttaacaaccacatcaagtgctccacaactgcctaactgtagctccagctctgggggatccaacttctctcacctctgtgggcccctgcattcatgtacacgcacctacacgtaattaaaattaatttaaagaaatctataaaaaaattttaaaaagaagaagactcagaatatactttaaactgactccctctgggagggatgagccattctccctactatgatgaaatattggcagagccaatgttatgcctgtgttatgtatgtgcagaacgcagtatgtgagtgtggccaccacacacttgcccatcctccagttctttcgttctgtttgtcccgtcttcctacttgtgtcctaagccttggagaaggtgatgcaggcatcccactgagggctggggacttcactgtcctttattctccgcacttagtaccagtttctgtgtcagctacttccattgcagtaagaagttcctctgacaaaggctgtgctaatctatgaatacttagaaggcagtttgagcacatgttgtgtagcaaacaatagtagtgagtttcccctagggtctatgatctatccagcttggtactagggttgcagtaccaaacatatattgtattctgtacatacagtacatcctgtggatcaggctttgattccagtcagaaagcggttagttaccctataacactcagcacctggcgtttttatgtatgttgtggggattgaactcaagtcctcatgcttatgcagcaagaaccttacaaactaagccctctcaccagccccagccttcggggtttttttgtttgtttgtttgtttgtttgtttgggtttttttttgctatttttttattaggtatttatttcatttacatttccaatgctatcccaaaagtcccccacacgctcccccacccacccactcccacttcttggccctggcattcccctgtactgaggcatataaagtttgcacaaccaaggggcctctctttccactgatggccaactaggccatcttctgatacatatgcagctagagacacgagctctggggggtactgggtagttcatattgttgttccaccgacagggttgcagatccctttagctccttggttactttctctagctcctccattgggggccctgtgatccatccaatagctgactgtgagcatctacttctgtgtttgctaggccccaccatagcctcacaagagagagctatatttgggtccttccagcaaagtcttgctagtgtatgcaatggtgtcaacgtttggaggctgattatgggatggatccccgggtatggcagtctctagatggtccatcctttcgtctcagctccaaactttgtctctgtaattccttccatgggtgctttgttcccaattctaagaagggacaaagtgtccacactttggtcttcattcttcttgagtttcatttgtttagcaaattgtatcttatatcttgggcattctgagtttctgggctaatatccacttatcagtgagtacatattgtatgagctctgttgtgattgggttacctcactcaggatgatgccctccaggtccatccatttgcctaggaatttcataaactcaattctttttaatagctgagtagcactccatagtgtaaatgtaccacattttctgtatccattcctctgttgaggggcatctgggttctttccagcttctggctattataaataaggctgctatgaacatagtggagcatgtgtccttcttaccgattggaacatcttctggatatatgcccaggaaagatattgcgggatcctccggtagtactatgtccaattttctgaggaaccgccagactgatttccagagtggttgtacaagcttgcaatcccaccaacaatggaggagtgttcctctttctccacatcctcaccagcatctgctgtcacctgaatttttgatcttagccattctgactggtgttaggtggaatctcagggttgttttgatttgcatttccctgatgattaaggatgctgaacattttttccaggtgcttctcagccattcggtattcctcaggtaagaattctttgtttagctctgagccccattttttaatggggttatttgattttctggagtccatcttcttgagttctttctatatatattggatattagtcccctatctgatttaggattggtaaagatcctttcccaatctgttgttggcctttttgtcttattgacggtgtcttttgccttgcagaagctttgcaattttatgatgtcccatttgtcgattctcgatcttatagcacaagccattgctgttctattcaggaatttttcccctgtgcccatatcttcgaggcttttccctactttctcctctataagtttcagtatgtctggttttatgtggagttccttaatccacttatatttgaccttagtacaaggagataggaatggatcaattcgcattcttctacatgctaacctccagttgtgccagcaccatttattgaaaatgctgtcttttttccactggatggttttagctcccgtgtcaaagatcaagtgaccataggtgtgtctttgggtttttaaatccaaattgtgtatttctgagaactcagtttcctggaaatgagatatatatatatatatatatatatatatatatatatatattaacaattctatcaaaatcttgtgaagagactacttttcccagagcccaactcagtcccttactgtcaagagtaccagggtttggtgggagttgaagtcctcagaaattagtcaggttaaatgggttttgatttgtttgacgtaacggcatagaacaaaatgaaatgagtttccccttggtgctttgctttgtttgtatgttaagtctctactgtccttgatttcattgaaaattatctctgaatgtttaaccccaagtgtcagctaatataagggctctgaatcatatttgacctttttccttttccattttcatcttttctcttaagttactttccaagttccaaagatgataaatggaagcattgttagtagatctaggtgtgttagttgatggctgtggacttgtagcaggcttcttcagtattctctggtaccagagaaccagtctgtgctgtggtttcctttgatggatgagacaagtgtagagctgactcttatcgcttttgtcctttgactgagtgtcaggcccagttagattgagtttgcattgccatgagcagggccgtgcgtgtggttggcctgctacagaaatgctactgggcctggtgattaatagtgttatcatgcataggaagccccaagcatagcagcctcacctgaaaaccaaagagatcttccacagcaaggacactgtttacacaaggactgctaagacagatatccctcacttagtgtgcagctttgagttcctaatgtggtgagatttggaagttacataggagaaattaataagtaatatctattatataacattttagttaaaaatgaatgcactttaagagagagagagagagagggagagagagagagaatatgaaagagtttccagttgatcctcattccctttcctggggcagcccctgttacttacccctatgtttgtgttcctgcttctgtagtagcattttttattttagcatatatgtgctcaagtctcccccattctttagaaaaggaaccttttctccgtcccgtcctgtatccttctttagcagcggcccactttcctttcttttaaagctaagctctgaaaagagttgtgtaccaccctcagaccctctgcagtctggctgtctccctcctgcccaaaccactatctgaggtcagcactgaattcctgtttctagggggctgcatgcgcccccccccccagctcctgggctgtggattcgttcttgccccttgagaagctccctccctgggcctccctgaagcagttcttctgctgtcaaagtgttccttcccaggcttctccctggaaagtcctttctggcactgtttctcaagggccagctcttttctgtttcccgggtgtgttgtcctggccttccttataatcgtagctccacctgaaacccgcaggccggagacaggaatttcctgagctgactcaggagactccatctggccataccatacagttcccatcttcttccacagcccagacactctcccagtgagagggttcctcttccttcccctttcagcagacacagcttccagttatgttccccacttagtggggaaatggaggcttctttgtggcttgccatgacctgaagattgaggtgacagacagtctttctggtggaaggcctctctttgtaagctttcatcttcttagagctctttatttctcacctagtccttcctgccttcacccccttctctccccgtcagctctcaccatggccttgtattacttagggcacttctgtgacaccccatttctctttaagtagattcagcatgacaggcaagacacacacatgtactggctggctacatactagcttacatactaaatctaagctcacattgcgtggtgtacccttgccaggagaggcttactaggtactgggcatgctcgaacctttgagtgcctgctactactgctctttccacctggaataccatccagccttccacctccacttcctcccagtaactccccacttcccattcatggaggcctttcctggccaggtaacctgccagctcccctcaccctgtatgtatatctgtatgtttacaaactgtgcttttccaaatcttcagtgcaggcacactgactgctgcatactgtgagcccagcatctgcttaagtcaatgaagtatgtgcttattttggattttgattttaggttcataaccatagtgacaggttgtggggtatttgttaaattcatggtaaattaggtaatcaggattttctgaccaatgaatgcaaataattaccaatgctgtattgaatgtattaagtaaaattaatgctggcaaaagtatttttaggggacaccaaattttgcttctcagacataaatagctctaccagcatattcccggaagagactgcctcccctgaggtgtcttcccctgggtagatctgcctcgggcatctttctgctgattgagcaggctctgtctgtctaggtcctgtataacccatgtcctatttggatttgaaggagaaaagaccctaggcatccctgctagttcactccattttctcaagggcctatatctgatgtgcagcttatatgacccaaaccacagtagagcagctcttggggtcatgtggatggaaatggccttggctgccaacctgatcttggtgtttgtgtctcaccctggctttcctctgtatagtctgactggaggaaatgcttagagaatgtgtttctaattcagtttgcttccatggagaggtgagcaaggggcagggagccttatctgccctgttgccttgcaatggaaacccatatgcctccttaggaggcatatgagcacaagagcacagccctatctctaaatgtctgtaggaaaatccccctctctttcatttacattaaaaagcatctctaaaggagatgccttttactaggtcccactggcccctctagggagatttattctccctagaggggccagtgtttttatggcatcagtgtttttatgtcactacttccttcctcttggggagaagggctgattgacgttatctctcttaaaagtctgtattttaatggctaccactaaatcttttggacatacatcttctccagacccagtaggctcacttcttttatcttttctgcatatattgaattttccaatttttatgtctatcataactgacctcatgtaaattatggtgttcaacactggagcctgatacagggagacagcagatgacaaacttctggaggaacataagagtctcctttaaagggagagggaaaatgaattcatgcaaaatacatttacatagtttgcaacattaaataaaggcagaattaccttcagctgtacagataatgctgaagggatagtagagatgacagaagccagaattgcttctgtgagaagaataatgaacagggcttggaaggaagaagaccccaggaaggagaaactggaaagtctcttccttactcatcagctgtggtcgttaaagcagcaaacgaagcacctgttccaaggcctgcctcactgcaggtaaaacacaaggttttgcttgcttggataactaaggattctacctgtctcaagttcaagggcatgccaggataattcagtttacacctacttcctttatcctatctacttctaatcatagaaacgttaggcttttagaccaaagagagttttaaatatcaaaacataacagatctgctccctagtgtttgtccttgctatagatcattccagaacctttcttcagtccttccacactgaagaatgggtctttataccaatggaagaggttgggtagaatggcaagatgactgtctagcccacacacttgggtcagtgtatctgtttctcagcactgctgcctcttaacttatacttaagaaacttcattatttacatttcaagatgattccttccttccgctcactcccagcagcccctgtcttacctattagaatatgatatttcctgttgctactcttggaatcccactaaaagaccatgtcctagatatgtgtttgagtctcaagagacctggaaatacttaagtacacctaacaagaagaccatactccataaatacagtattatattctggaaaagatcctggaacaaagaagcaacgctattgaaataattggtgaaattgaaataaagtctgtaaattgtatagtccttaattgctttgctttgaccattgtcctatggctatgtgagttgtaagcactgggggaagctggatcaatgctacaaggatatgaacattttacaaagaaagaggaagcatagataccaacttatgtatgaatgttcttttcaaaacattcaaagcatgagaaaaattgcagaccatcaaagtgtacatgtaggtagttccagacagtggaacataaagagttaacctttatctgtgctcatctcccttcccctcagtttctgatctgattgttccattagtctgtgctaatgtttagcgtctgtctcttctgcatccctcgcactctgtctgtctctggatagttagcacatataggcataacttggtcatccttcctccttgatagcttgatcccatgttggccagggcatcaccatctacttgcctacaccggatacccagagtcatctttgacctcttcctcatctttcacccattttaaatgttgtcagtccttagagaaagtcccttataagtatgtacctgcagctttcagtatctctttgtcattactccagaacgagcttctgatatcttgtcgggaacacctgccagattctctctatttttactgcccttagagagaaggcacaggagccagtatagtgaggtacacctgtattggttgaatgttggatactgaggctggtctccacttgtggtcgtggagaacagcttaacatagagaaaccagtctctctcaaaaaaaaaaaaaaaaaaaaaaaaaagaaccaaaacaaaagcagactgggagatgccctgctttggtaaaatgctactgtgtacacacaaagacttgagattagagccccagcacccatgtaaaaagttggtagcagacatgcatgtctgtgatcctagcactggagtgtcagagactggagagtctctgaggcttactggccagccagctcaaccatattgctaaagtccaacaccaataagagaccctgtgtcaaaaacattgatggaaagcagtcaacctctgacctccacatgcacgttcacacaggtgctttgtactcctacacatgtgtacacacacactcacacacactcactcactcatatacacaaaggtcagtgattattttgctgcccccccaaaaatacaccaaagagcacaaataacagctaaattaaatgtttagttcaaatccacctctgcttcctgtccccaacttcaagaaactggaaagagcatagtcctttgtgctcagaaagtcttgaccttgaatcccagtttcatgatccccggcacattagtctttacctctgagccctccctcccccccccacctttttttttttaaagaaaatggagtccatatgtaatgctcagaacagctggaaggtaaggtgacattatgtatgctgaattaaaagttttactgtttattattgctgcttaacactgggtgcttaaaatgaggaatgggctcttaatcatctctatcctgtgtgttaatgatgtgaggattggctgtttcccttggttccttaaagtatggtccactttccacagcagggacccttttctgcaaaatctactgcagcatgcagagctgaacacttttcctctatcctgtgtgctgcccaggagttgcatcctgcttcctgccacacatccgcactagcccattagagatgaaggagcctggcctcaggacccaagttctgtttcctagaatgcaatgaatgcccttgtcccttggtctatggatggaactgttttgaaacagaactcttctattcctacagctccaacctagaatgactgtttggtcctctactagtcaaggctttgtccagtgatccataactcttttattcagtagtgtggtactgtacctggtatgtaatatgcatttaatcagcattagatgcatagagaactgaacatattcatctctagagtttggtaactaatctgcccttaattaacggactgagtaatgaattccccagcaagttacatattaggccagggtttctaacctttggttttactagtaataggatttttgccttcactgtttcctgctctctacctatgtgtatgttctttctcttcctaaaactgcctcagtgattctgatgcatagccagaattgggatctgccattctaaaagaatatgtaccacacatcactcttaacatcttctctttccagcatctagtctaattatcagtttgtttctatcctttagctgtacttggctccatgcttcttgaactcagatactgagacttcctcgagtttggtgtttgaaggatagtcataaatgttagttcaattattgggggtttcatttaaaatacaagttagagctggagcgaaagcacagcattaaaagctgaggctcacaaccaaccaccaaattagtgtgtagtaccatgtgagacagagagaaaatactaacaactgtgagtgagaatttggtttgaatatatagtgtttcctttttgttgtttatttattttgagtcagtgtcattatccaggttgacatccaacccaagattctcctttcttaacttcccaagtactgggattacagacatatactaccttctactgtgtgtgtgtgtgtgtgtgtgtgtgtgcgcgtgcatgtacgtgcatgcgtgtacatgtatatgtgcatgtgtgtgcatgtacgtatgcatgtgtatgtattgtttataactgtctctacctttctctctttcttgagagctgcttgcccacaattgtttgtttgtttgtttgtttgtttgttcctatttactcacagtcatctgtctaggtcctagaaattaacagcagctagtgaaatttgttgaagtgcttcaatttacagttttatattattgtaaccacttgtgcccaaaatctaaaagttaatttcaatgtgcccttaagagaatatatcatgaatgtgacattcagtggaactatccctgcccataggtgattctagagaaacacataggttgccattttaatattccttaactctaaaattagttagatatacagttgtagtggttattttccattgctgtaacaataaggcaacttataaaagaaattatttacttgcacctatggtttctgatggttagagtccgtgatgacagagcaagatcatggcagcaggaatagcttacaggcttacgccttgatccacagcagaaagtagcagagaaggcacactgggaatagcatgattcttttaaaatctcaagttcatctctcatgaaaacaggtccttcaacaaggccacacccctaccccttccaaacaattctgccaaatggaggccaatcttcaaacatgagcctattggggaaaattggggacatttttattcaaatcagcatgttgctgttatacctacaccgacatcagtgctagcaagtttagttgtccttgttacacagtatagtagccggacaagcatagaagctgtttcagatctgtgtaagatgacacagtttgttagagacatacctaggatgagaagccagaagcaggacaggcatagtggtctactcctgtactccggcatctgtcgaagctgaagcaggaggatttcgagttcaaggccacagtgggctacatatcaaaaactcatctccaaaaaccaaaagaaaacaaaacaaaacaaaaatcaaatgtggcctataatactatacaataacatttcagataacattagaaatgaaaattatatttacttacagttgtttaccttcccaaaaaaaaacatgccagaagaaggggaagttttctctgagggttgagttctcagagggttgggaacataagtagaggtaaagggggttctgaaagagactcaacaggaaacatgtgtcctatggcaccactggtcactgtgtatctacctttgtttccagaattttccccagagaatatctccttcaacagatccacctgtactctctcgctgacctgcagcaggtatgtgctcagagagcttttcgttttcattttctgtcagaagtcactttgtggattgtggtttgggcactgaattaatctgtcattgcagtaatttcttcacagttaactaatttctattcagaatgggggagattcagtataaaaaggtactatgagaccatgacaaatactggcaagaatgtggggtccctggagcactcatactttggtaccggggaagttaagtggaatagccactttggacagagtttagcagctccatgtaacccagagattctgctcccaactacgtgcctgagagcttatgaacgcttgtccgtaaatggtaggggtatgccttgcggttccagccacttaggagactgaggcatcgcgggcttcatagctagcatagcaagactggtccccaaagcaaagaaaaccaaacctttgtgagaatcccaagtgcagcatgagtcacagtagaaaaaatttggggaacagccagatgtctataaactgatagatggttgaataagatgttgtttgccattagtatatagcacctaaggagaaaaagaagtgcaatagtgatacacactaaaacatggatgagcctttgaattatcatgctaagttaagaatcagataggaaaaaatatctgtcattacaactatttgaatgccatgtccacaatgagcaaattaacagcgacagaaaattgatgagtagttccaggctctggaaagaatggcggtaagcagagactgccaatggatgtgggatctcttccaggtctgaactagacagtgatgctcccttgggaatatactgaagataaacgggctgttttctttaaaataatgaattttatgtgatgtgagtatttcaactaaaaattatgtgaagaaaaaaaaagacatgggaaaggcattaagtgaatgcacgaagccttcagacgctgaaatctaacagttggatacagtttaataaaacatagcagagcacagaagataggcaaaaccagcctttaggattttgttagtacatgtacttttaatgattgacaggttagcagccaggaagaaaccaaggtcttgtgtgttcagcgctgagatctgagtctacttagctttggttaatcatttaaaccaatcttactcactgcctaggaagctgttggacactgaatgaaagcactgactttactttctaaatgaatattcattcttttaagaatcaaaaaagccaggtggtggtggcgcacgcctttgatcctggcactcgggaggcagaggcaggcagattgctgagttcgaggccagcctggtctatagagtgagttccaggacaaccagggctacacagagaaaccctgtctcgaaaaaacaaaaaataaaacaaaacaaaaaccaaaacaaaccaacaaaaaaagaataaaaaaatatttgtgacaaagttagaaatcttaaactgctgggtgtctgtctttgtttcttctctggttattttgcccagaagtgagatcagcttaaaaactcacccctgtcccgtgctcacttctcagactgcaaattacttttcaaggtttctggtctatgccttttttttttaatttaaaaatttaagacttttgtgttccttgtcatttagaggtaagacagttgtttcaaatggaagaaaaagtgtagcatttagttggacatgcctgaaagacggctggctttaatctatactccttgtcaaatatagacctacttgctccttcaacctgcctgcctagataagtcctcatggaagctgctagccagggtacagagggatgtgtgtccaattacagtcaacctggtgacattctagggaagaattgattgaattttctgatatacttttatttatctatcttcttagcagtctgtgtgatccatagtagctggagggcccagacactaccattgagacatgtgtttaaaggcaccaaacattcttataaaggtggtttaaaatagagtagctcctctataagaaggcccttcaaaaatgaattttctgtcagatgaagagagaatgagaataattccatagtcattttagggtgtcagagtagcatatccatttagaataatagagcctgctttttaaagcttccccactgcctcccccacatgcccccttttttttccttcttgtaataatcaaaccataaataccaagcagcttacttaagtcagtgacagtgtgttcttggtgggccaggccattagtcctccaaactgcataagtagcttaaccagttttcagctgggcagtgggatagaagccatcgccagcttatcaaactccctgtgggcaggggctagagcgtcccttaatgcagcatctccctctagcctggttctttgtgcctggctttagagcccaaactcatcatatttagaggaagtttaattctattactgcttcagcctgatgtagactaaattgaatttagcttttgatctgtctgtatcttggctatcagccctgaagagcacccctgcccatctccctttggtttctgggcaaataataagtatgttttctaggtctgaagtgttcccaaatgtaggaaagggacctggggcagaaaaacaatactgtcatttttttctgaaagagtatatcaggaaagcaggagcccttcctggctccccgtgagctgagccatcttggttgctcccttccagtctttgtcagccacagaagggttacagtcagggattttttttctccccatctcgtactcttttgttgttgttgtggtggtggtggtnnnnnnnnnnnnnnnnnnnngtggtggtggtagtggtggttgttcatttatttatttattcactttatatcccattttccggaccttctccccccccccccccccaagaacttctgtaaaagcagaagtttccgttttatacagtcacctacagaaaaggggtttgtcaggtgtatgttttatagtggagaaaaagagaaattcataaattattaagtagtcatagctcccaagcaacaacatatccctttttacaaatttctcttaaatttgattgttttaagaatttgtggtgtgataggcacagcagctggtgagatggttgtgaggatgaggtgcttgctgccaaccctggcgagcctgttgcatccctgcggcctcctggagtggacggagagaactgaatgacacttatccgctggtgtcccatcttgcatgtgcaaacgagtatgtgcatgtgtgtgagtgcagtctctctctctctcccccccctctctctgtctctcacacacacacacaattaatagacaaagtggaagttgatatttaagcatagttttaaaatagtgtatgcattacacagagcattaatggtatttaaagatactgaaaatattctggtagcacaaaatcacatcccctcaaaagttttgtttttataacagtactcaaaatttcaacaaatagacgcaatcaacaatggctgaagacttttatctacctaatacaacttttgttacagtcgagaaactactgttttaattctctgacacctttgggtgtattcattcttactgtggtacacttgggtatgtgggaataaattacaagtgctgacagttgcttaccagaaagcaaatcacctttacatgcatggaaaggtagcagttgttcagcacattatgtgactgtcagttggcagcatttcctggagcatattaatattaagacagagccaaggatcattctgacctaatggcagggccaagggagtggctactagggcaggcaaaggttctccagctcctaggagatctagggcacaccagctcaactcactcatttcttaaaacttgattccaaatgaatttctgttcatccaaaaggatcttagaaaatgatactcaggctgaggtggtggcacatgtctttcttcccagcaatcgggagcagaggcatgtggatctctgcattcaagtccacttttgtctacagagcaaattccaggacagctagggttacatagtgagaccctggctcaaagaaaaaaaaaaagatattatttagtcttttaaaagactttttaaaaaaatttctgtatacctgtgtatatctctgtgtatatatgtatgtgttgatacccacagaagccagaaaagaatgtcagatcccctgaggctgtagtcacaggcagttggttgtgagccatccaacatcagtgctgggaaccaaactcaggtcctctgcataagcagccagagttcttagccactgagcatccttcctgcccctgctagtgaagttctttgtgggacacttggtcttgtttggggtgctttttgctgtttgtttcttttctttttttccattttatctcatttgttatatatatatatatatatatatatataattattattattatttacttatttattaggtattttcttcatttacatttccaatgctatcccaaaagtcccccataccctccccccctccactctcctaccctcccactcccacttcttggccctggcgttcccctgtactggggcatataaagtttgcaagtccaatgggcctctctttccaatgatgccgactaggccatcttctgatacatatgcagctagagtcaagagctccagggtactagttagttcatagtgttgttccacctatagggctgcagaccccgagctcccatatattggggagaggctttctgttaggaggtgcgaatacacggtgttacacactcaaaaggctaaaaggcacaggcagccacgaagcttttgtgaacatgtggacatgtaaaatggaaattttaataggaaaatttcttccaagaggttttccttgttttgataccttgagaggagggaatagaatagaatttgttttgttgttttatttcatgtgtataggtgtttccctgcatgcatatctgcacaccatatgatgcctggtgcccacagaggccaaaagaggacgtcagataccctggaactgtatttacaagacagttgtgagctaccatgtgcatcctggaagttatacccagaacctctgaaagaacagcaagtgcgtttaaatactgagccatctctccagcccttgttttgttattttcaatgtattcagcattatcaggtatccatgggaagactttaagacagaaatacaatagaagaatgtgtcccaacaatattgcagatatagtaccacattcccattgccttgggtttcccctgttgccagtgagtagtagacaagccagccccttacttctacccccttgatttttttaacagtgattttaaaagttccacattttaccagagactatgagcatatggaagtttctgtggagcagttcttagctgttgtgtggatccagttagaatcctggttggaatatgtcactccctagagtgtaaataaggaattctaatggtccttctgaaaggctaggtcagagtgaacttttacgtgtgctacgaaacaaaacctaaaatatatatgaatcactgcttcctctggtgttactcaccttcaggacacttgtaagataagcattcagtgattctagtcatgtgggattcaacagaaaggatcctggatgctcccaggggtggggcagtgggctagtgtagcccttcctcaccccttccaccccctcacccaccccctcaccccctcgaaaacctcccctgtaggacagtttaagggtcctcttcctcactagctactttccctggattccaaattttccaaaatagaccttactttcagattatagtgaggaaaataataactatgctaccacatacacattcacttatggtactaatacagtgaaaacagtatgctatttcagggagaaacatttcacacatttcaattgtttacttttttgttttagtgtttcaagacagggtttctctcggtaaccatgctgttttagaactcattctggttggctgccaataactcagcgattcccctgcctctgcctgagattaaaggtgtgtgccgccaccacctggctcaataaattgcttttaatgaagaaaagagatggaaaagtttaggattttaagtagagttgtgagtgggagggatgccaaagaagagggagggcctgaagacctggagagtcatgaaaagaatgagctatagccaaatgcaaaatccctctccagagtgtcctagaacagttggtcggtgggttggtcgcttgtttcacacagaagtaattagcattaacatctcacacatgtgcatattcagtggtggggtggctggatagataggagggaagggatgcatagtcccccccccaccccggccatttgtgtgtgtgtgtgtgtgtgtgtgtgtgtacatgctcatatacatgcatacatattccagaagattatgtcaggtgtctgcctctatccatttccacctggttctctcactaaccctgaacttttcagagccagcatgcttttacatgggttcttggaatctgagcttaggccctcctcctgtcacagcaagtgctcttactcactgagccatcactccagctccctgatctctgcttttgactatcaagataattgtgagttgtttaatgtcgcccaatttttgtttgtattttagacaggtcttgctgtaccacacaggctgacttccagtccagtcttcctgctttagcctccagagtgctgggattgcaggcatgcacttccaagcctagctaatttttgcaatctttctgaacactcactaaatgtccctggatggcaaacttctctgctgagattttgcagagttgccctattcatcactgtgacataaatgtctgtcagaaatgttgtacaggaacaatgtatctggtggtccacttcagagcttctctagagctatagctagtaagttcacaaaaaggccatgtccaaggcagttcaaggccagtctttgaagatatgttttgctgaattcttcaaggatgttggtgaatcactttgtatgccctgcccccaccaagcaaacagactcacagagtgttgttctctgtgggcactcttcacagaggcagcagacaaaggaaaggcctaagtgggcactcagggcagctgaccttctgccaaagtactaacaggtgatgacctttattcacgtgagggttgatgtcactgagtccacagccagcaggaacacagtgcttcagtgcccacaaccaagtcaccaatccccaagcctcaggaggctgaggaacttgtattcatagcctcagcagccctgatccctgcaccattgtccacccaagcattatggggcagaataactaattaggagcattcggatttaacaagcagaaacacaaagcctgacagctcgcctgcgtcactccctagccagtgcttgggtctgctgtagctactgtgccttcagaaaccctggacacattctgggatgtggcaggagtgagctatcgttaagacatcagtaaatctgttaaccactctacaggtctgttctatacaattaatgaactaggggggaaacataaggtatttgggaaaatgctttttaagcaaatgaatatttagaaaaatgaatgtgcctgctttcctcaaaggttttttctgaggtggtgagaaggggttgaatgttactctttgaaggccctgttgcttggcagtctcaagggagcaggtgtttcttgagcaggtgccaggcagtccatgcctcctgatcagaccccaggctgttcctgatcctgtgtggaagtggaagggaccgaatgataagtcccatgtacaagtcctagatccagaacagaagccttcagtctgtgcttcccaccgaccataatgactgcattttttttaatttagtttggtttagtatagtttggttcagttcagttcagcttagttcagtttagttcttgtttgttttttgtttgtgtgtgtgtgtgtgtgtgcgcggctgaaggggatttgaaggggatttataaaggaagtaaacaacaaggcagtggcacagattgttctttatggtagctggttagtcttagcatcgtgcccaactatagtgtggttcacaggtgcattaaaggattgggggagaagaacaggattgtagcagaaaaaatgttaacattcaagtacagacttaatgaaacttttttaaaaaccagctcagaatgatgaccttctatgaatttggataggaagccccattaagcaggtgaagagagctcagttgatggtccccataagccccttcggcacaagcaccatctaatggctgaggatgcagccacaaaattggaaggtggccagtcagtattgaagtcagttgtctgggacacttggctcctacttatttttagtcatctctgtgttggtggtgatttttgtgttgtttcttcccatttatataaaatccatcataatgtgaactcattaaggactgtttccaaagaacacttgtgctatccatagcctgactgcccagcctgacacctcacagagaaggtgtcaccaggaacgtgagcctgtcatgctatattcagctagtagggcatatttctgtgtgttcattatctattgctatacaacagattaaccccaaacatataatttaacacaagagtgaacagtaattgtctctcatggttgttatgggccaggaattcctgagaagttcagttgagctgaggttgcaaggagtacactgggtggggcctgtggtcaccagctggagcagtgtcagctactcccacagctggcagatgagggctgactgttagtgggaggcctcttgtctgagcccacatgggccacgctacaggatgtccaaggagtcctcaggatgtgatagctgccttgaggatggtttaagagagcaagagataggtgatgtaattctttctgtgtggcctggccttagaaacccaggcactgccatttctgccatattctgatggctaaaaagcattgctaaagcatgttccagtggtacaggccatgagcaaggagtgcctgaagactccatttttctctttcatttgtgtgtatatgttcttgtgtgtttatgcatgtacacatacaaaccagagaacaacttacaatgttatttttcaagtagtgtccacgtttattggtttgttttctttatgttttgctttcttgtgtttttgattgggtctctcaggtggcctagggttcaccatgtaggctagcttggctggtcagcaagcccagggacctgtgtgtgtctacatctgcgaggtgtacaagtcataccaccccactgtacccaccgcctctcccacttttcacattgtcaagggtatataagcgtattataaactaccctgctctggaataataccacctcacatctgcacaccccttatatctaatcccctaaacaactctgtgagatagatatggctacctttaacttttaatatacttacttgtgtagctcatgtcacagtgcgtgtggaggttggccctctccttttactgtgtgggctccattaccaaagtccaccaggcctcaggaaagccaccttacccactgggctgtcttgccagctctggcctcttttaaagacgtatttgtacttttttaatctgtgtgtgtgttgtagtatatggcacatatgtgaaggtgcccatggatgccagtcaggtatgctttcctccatttgtgtcagtgtgttagagtaccaaatgactgggaaacacgctcaaccttgtgtagcagattgtggcaggttgtaagggcgatgaacaccacctcctgtcccgtggagctttcttacctctcacttacctactcccattgagaggtggggcttttatcccctttccctggatctggctgggtggctgtgacattgaaagtttttctgtgtgatttttcaaggccaaggtattaaaaaggtaatatagcttcaagacttggcatgagccatcatgttataaggtaccccagggagggaccacatgtagtcctcatggcttacatcccagctgagcctgaattggtagcaaccatctaccactgggtatatgagggaaaagtccaggcttgacctttgtgtcctgttagctgagggtgggtataaatgagtgcaagtagtttagaacagagtaagccgcctctgctgtatcccgcatgagctgcagactgtgggcataataacatgactgttttatgccactagattgagggtaatttgatatgcagtagtagtaattggaacctccccataatttggctgtcagggaagacctcctaggagcagattataagttacattcagggcctgtaggtatgagccaggcacgcaggaatggaagaagactctggtagggtaacctcatagcactctgtgacacgagttgtaatatcccaccactaagagcagaaagaaaagaaagtatcactagccatgacattcctgaagaatattccatttagtacataaggattatttgggcaattgtctcagcaaaacattcatggaatgagttcaatggtagcattcctctcaagaataagattccactgtgcccagagctgcagaagtggggtttgtaatcttcactttctccttgttcaccagaagcatgagcccagttttctgtgaccaaacccctgactgggtatttcctccgtttgcattcattccttcagcaaatatgtattaagcatgaataggccagaaacagtttgtatggttcgtggaacaactgaagggctcatttctcaggaaaggtctagtggctcttcctggcacagtcaccttagtggtgtccatgggattttaccctttggtgccaaatgccaacctcctagcacattttcacgtcatcttcaaggacaccagaaaagtacagaagggactgaaggcctcaggaagtctggccctttcctcacacttgcattgtcctaaggaaccaggaagtacagaagccctataagccacttagcacactgtcttagctgacaccattgtctccctgtggtcctggcttataattccgtctgtactcacagcttgctgttttcagcaggagcacatctgtctttggaagggaaacgagaaggctgacaagggcagcttttcccattgctgtttggtttttaacctctcattaagtctcagtaaagcatgaatgcatttgctcctgggatcttaagtaagattagggatcagttgtgacagcaggggtgatctttgtggcagaaggtataggcagcagtggtactacacaagctactgtaacattcagctggtgaatggttttttttttttgttttgttttttttgtttttttgtcacagaagtctgtattcctgagagttagtcattcatgtattcacctacacaaaagaaagtggcaagtgacctgtgtgtaccaagcactcatgacaaatgccaggaactgggtagaaagtccccttagcactatcgatgccataggataccaaatgtgtgttaacatgatagccattcagaatagcagcctcacaagtctgtccaacattgtaaaggagagacatacagatttagaacagagctacattggttgggattcctgcagagactctggaagtggagcctggctgaagtggccagaagtgagactttgggttgggacagtgaacctgagagcatctctgagggaacagctattattcaatagcccccagagtcaccagctctgtccattttctgagagaagccggaaatccgtattttatgtgaaatttctcaatatttaaacactctgcaggccaaacaaaacacagccaccggttttgacctctgctttataatagagaatgcctgcctttgttcctgcaaactaatgaatgctcaattaagagaaggaatttggaggttagtgtaagattgtgctcctcaatgggctgcagaccccatcccaaacccttgagatactaattgacaggcttgcccaggctgacagcctggctctgaagtggacacacacaaggaaatagcaaagctattccaggtcacactgcaaggtcagggcagcaatgcaaacattaggaaggctgaaaacacaggtcaggtggcagtaagaaagccccacagtccagatagctgtagttgataaatcatattggaaatgtatcagcagcctctctctccctggtattgctctgtgaggtagaaaattaaatagaaatcaaactgtagttggctgtcaggagcttttaggagaccagcaagccagtatgaggtcaacatgggatgaagtttctgcctggagcaaaagtctccaggagggtaatgatatacactattgggcatcagagggggctgggtaccacagtgcttccttcctcatgttttggagttcactgcccatgttcaaatgcctgttcacccaggtacaccttggtcaaggaacttcctttgcgccaaaggcattttatctctgaaatggaaatgatgttacttgccctaaaagggagttgtgaagctcagtgttagttagagtctgcctgacacacaaggtgttggaagatgtgctctttattcatggtgtacataacaacacttgtatgcagggagagcccagccgtctcagtgtcaccgagacacccatctgtagacactcagccgtctcagtgtcaccgagacacccatctgtagacactcagctgtctcagtgtcaccgagacacccatctgtagacactcagccgtctcagtgtcaccgagacacccatctgtagacactcagttgcagccatcactgcagaagccgtgctgctgcatctcagttctgcccatcaaactcagagcccaggctcctctcagctgcctcaccgtcaccatggagtgacacaatggtagaaaaactctggtatgcacaccacccagctttcagcatagtcctagaccagacttctctgtgggcccacaaggaaacgaacatggagagcccccatccttcacggcagtccacttcctttgcacttcaccagagtgatttttttttactgtgaccctgctatgagcttgcctcctctctactgttacaaaagggttcttcagagcttatgccacgggtgagtttgtgtctgctaagaagggcgcacatcctccacaccatttctctgcaggatgcatacccttggggagggtatgcacaggtatctttttaatcatcagaagaggcagtcttttatagaactgtagaagacacatttttgtactcaaggaaaaccaccaagaccataccatttctgctgctctcagagaagcccagcagcctgagatgttggcagaaacaaaaggcaaccttgtttcttcccacctgcaattatagttttactagcttgtaaagtgcacatagaatttgtggcacattcttgtcttgcagtaggggagtggccctgctgtgaatgtaattggctttctagcttcctttaacattgaggtggaaaggagctggcctgaagggcctttatgcttagaatttatccatgctgaattgtgtttaaattccatacatatccctgaatgcatggttccattaagtcttagttagaagtggaaatgaggcttatctctagatatagccccttccctggcattcttgttcctttataacagctgagtctctctcttctctccccgacctgtctctttaacctaacttacactggtactaaagatatatgataaatgagtgtgatatctttactcagtacatctcatttggatcacctcctcccttttccagcctcagttttacacagaatctcttcccaagctaaggatcactagacacatcttggacagaaacttttcttatttttactcccggttcctgcatgtcctagtgaaaggttgagctacacaatctttagagcctcttccagcctagttttaagcttcttgggaggttactgaaatggggaagccaccccacgtggcatctgtcttccaggacttcacagccagctatagcaaggagccaaatgagctagacccctgagtgccaggaaaacacctttggctctaaggaacaagacagtgtgccacaagtcagctgttttagctttttgtcagtaagtagctattttaagtattgttacaatacagtctgaagaacagcttgtaaaaacacattctatagataatcttgcatcctgtagctatcaaacaggctctgagaaatgcattgctaagcagtccattgttgtaaacatcgtagaggatacctaggcaaacctggttgatacaggtcaaccagcatgtggccgcatagcaccactaaaagatgctgaggctgacaggacacagcatactcttacaggaaaccttttcctctcaaaagtaaaaagactatattctaatgattaaaacagatagagtaataaacaatcagtaacagttgtttattatcaatatcaactacaatggaccgtctttaatgtgtatgctatactgtcctatgttgcataaattggagatatctatgtaactgtggtggtacgttctgagaaatgtaccattttcctcatgcaagtgcatagtccttgtataaactaggacggctagctccctgggagctagagtcttacagggctgccattgtacttttcatgcattggtgactgatatgcttaaatgacacaagaatgtgacaactttatatactccttaaaaataattcctgtttatgccccctaatccaatggcagttaaactaatgtccaacactcaaacataggctattaaaataatatgacatctggtgcagttaattaatgaaggaggaatgggcatttgctttggggttaaaagcagagagccagaggctctttgtagctctggtgtgtaagagatgggccacttaggaacttgtgatacaggggacattaaagcaatggggtaagattttaaggctggagaacacaggagagcaagaaggctgtgaagggactcctgaatggaacagaggtcaagggggacagggaggaggtaggcaaggcagtcgtaggtaataaaactgctgctcatagtttctccttccctgcctgcggccttcagggacaggtcaatgctcatgcagcaagaggcaggagccagagaagccaggattctctgccttctcacaccatccctgagttactaagctacagtcctgccaaaggcacggggcctgttcctttaattttccttttatactttgtcacaagagaacagaaagagaccgtccccaaaccccatgacccacaaggacagtaacagtttatccttaccaagtcatgtaatgtctccggtgcttaaaatctttgtgtgaaaaatgagaaggctgtactaaataattagattaataacagctcctctttattatgtgctcaacaaatgtcatttacttttatgttagagggctgactttaggccagtccctgttctaaatctccatggattatctcatgtgatcctcaaaagtgccctctgagataggtactattattatccatgttttaccaatgagatgaacttactcaaggccatcctgctggcatggaggagctggaattcaaactcacactctcctgctctagccaacactttatgtcattgtctgttttgtgtgaaatgtttcaaatgtttcaagacataaagaatggctactgtcagcttcataattaaccccaacagtcaaaaattctttcgactacgttttagacctctttcaacctatgttgtagaaatgagaaccaccacattggactgttttctactagcaccaaaccttttcctttgtagtagcaaactgccaccaagatcctcttgctagagaagcaaaggcctcctccgccaggctggaggtccctcagccttttcctgggtaaggacaggaacaacgggtcaaagggagatagagctaggcttacacacccctcactagctagagagtgccaggcgctacccagtgtttaaagagactgagcacattgtgatcctattgatcaggaccatgttcctgccccagttcccctaaataggccttaagccccagtattatttataggtcagttgtaaatagtgctgttgtggtcagatattgtcattctgtctgaaccaataaaaaccagcaattccagaacaaagcacctgagtcacttatggactagatgtggtttacaaggaaagtagactaattctatgtatttaagaagcttcacattcttatttttcaaagtttggggttgtcgcattctgtatttacaacttgtgtcagggtttccactccttactccctgtgtatacatttttaactgactgctcttcaattccctccccttcagttggtgggagtcattgacacatgcctggagttcagctagtgcccctcccacagaatgtggttagaaaacccgactcttctagaattgccatcagcctaaaggttccttctggagggaccaaaagcaaaatctctgatgcagctgacattttaggtgtgtatataatttaccaaattgttggccacttggctctgagttggtggtcacaaaaggaattagcagccctccccttctatccccaaaatatgaaaagggaagggtgttacttggcattggctcagagtcctgctggcacacagagtcaaacagcagcacaatggtacatttggccacaaaaggctttgggatggtaagaggggccaaaatagttgtggcataagttggctagagtcttaagcaaatctgagtttaatttaacatagagataacaccccccaacccccacccaaaactgttgcttcctctgtccccatggaatgagagatggtagccaggagttagttcacaggggcatacatgtgctttcaaagtaagacacagtggtctttatataggctttcacatctgcctgggcaagatggaataaggataaaaagacataggggtagctagggaaagctgaaaatggatcttgaggtttgaattccttctgtgagtttgcttaagccacagtgcctgagcttagactggagaggcaggcagtctgtctccttgggataaggaaggatttggaacgcagtgaatgtgaggtcttggccccactgtgttttctggtttgttttgttagcagaagcaagttattctagtttcttgcttctggctttccccctcagcacactttaagcaatgagtctccaccccgttgatggcaacggggtggatggaatgggataatgaaagggtggacagagacgtcgattcagcttcctaggctgaaggaaccaggaagatttcagacctcagagctagctcctcagtccatcaagggtagtgagggaaggggaccacaggactgaagtcatctcagaccaggacagaagttgaagtctcaaagaaacaaccatggccagtagttgttagctgggaaaaccagcttttgtcacttggaaatatcaggagagacgctatatatagagaaaactggtgtagtcaccaaccaaaactaatcaggacacttacaatggttgaaatggtatgttttatgttatatatatttgccattcagtaagcaaaagaacgtcttccctttaaaaaaacaaaacaaaacaaaacctagcaacagcaagcacctcagaaaactaccagcactccttgactgtggactctagtttacaaccttgaatatttactaagtgcttgtcactgtgatgaagcaagttcaaaatatgtgtcaaacaagacacatgttctaggtgagcaagcactgaaagagcccaccgagtcacaagaagatgtgttgtaggaaggcacaccagcccctcacacccaacagggcctgtggttcacagggcaaaagtgtagggggtacaacttggtggctctttttatgtttatgggcagaaacagggtctcactgtgtagccttggatgtccaggaactcactatgtagaccaggctggcctagaactagcagagatccacctgactctgcctctcaagtgccaagactaaaggcatgccagccttaacttggtggtccttggcaaagctcctgttagggcttccaagaataaaatgtcatctaagtgacccagttttttaaaaacaatctctaagtgaaaaggtcagcctagaattcaagtctttctcttgtcattcctggttacgctactgtgaataatgcttgggcagaaggaaatgcccaaaagatagagtagaatgagtcacctccaggaagaaggcagagatggaaatgagctcaaaaggggccattcgttccttccagctatgctattgtttatttgtgagtggagcactgtgattaaactttgttttctctttagtactacttggtcctgggttcaagtaaatagttggcgttcaagtaaatctttaaataacgatggtgtgtgggcttgattcagcatgaccactgaggggcactttagcaaggttgtcgaggccatagagtgagaatgtcagctgtgctcctcagccaacctataagcctaaatatgttgcttaaacttgctgcagctcaatttccttcctgtaaatcccacctcactaaggtgtgagtttaagtgaggtgcccatgtgtgtggtgctgagtgtaacgtttagcaatacagagaatgcccttagtgctcttagtggaagtcccctctatgatgtgaaaaacaacctcttggccaatagcactgtaatgtccctttatcatagcccatctgaccatagtttctttctctgctcatgtttcttgtgctggccaccagttagactatctgtgaacagcaagaacatactaatggacactagaaattgaaacattacactggagataactacatggttttatatttactctataccccctttccagcacaattccagtcttttctaggttacaccccaccccatatttctgtctctgacatgggtaataatttactccacatgactgataaggaaactaaataagtattgaatttttattgctatatgttagtaaatagttaaatgtcataaaaaatgctttcagatggcccaacagaagccattggaagctgagtggaaggaacagttggcttcctgtggtacactttccctttagaaacactagtaggaagcagagtgtgatggcccaataggaaataagcaaaaaagcacagcagaactaaaaacccaacagagtgacctagacatgataacccacacctgcaattccaggactcaggaaacttaggcaggaagatcaggtgtttggagagatcctgggagatgaaaaagttctagagcagcttggattataaatcaagacctcccctcaagaaaccaagggccaggggcaacatagctcagtgatcaagtgcctgtctatgactgcctagcatgcttgatcctgggtttgatccctagcacagagatattcagtgaggtggcactgctaacagcattgtgcccttaaataagatctttttctgttgtcagaactcagtgtgttcttagtgataagttattctatatgttgatgcatataaatatgaatatgcgaatcatagttcttattattgggtatttaaataaatgatctcctttccaaaatttggaacttcttggtaactcaattttattttatttacatttttacttgattgtatctacatattttctaggatgccctataatgtattctcctgaaatcaccttagataagaattatgaacactataccaaactgcagttcttgtttatttagacaagattgctgtctaactcactggtgtgagctgccctgcaaagaagaaaaagtaatggcctggggatgggtaaaggtgggggaggcaggaggaaggcaagaagtcagcttggccccaaatggctttggaacccaagagaagggagaactggctgcccagacgtgttatttttcctgtggcttccacccccacctcttccagtctgagctatgagtacagttgaatttttcaccacagaacttggctatgcttcctaagggactttctcctccccccccccatctttccataaattataggtttgtacatgagagcagagcagatgattctcattatcttttgggttgggttcatgtgtgcatgtgtgtgtttgagaaacctcctgctgtccactcttagctgtatatcagaactcaaagctgaacagcttttgttaacaggagagcccgatgaccctccttccttctcaacaggatgattttaacttgacttatgtcaactgcaggaaacaggaggcccaggcactatttactcacagccctgatgtcaggtacagtacctgacagacaccctgtgttgaagtctctttgtgagtgtatctgctgattttgtcatttgacatttcaaaaatacattttacttccataaataaccagttcagtttactgaaataacgggacagacgtgaagaggtaactaaccccagaatacagaaaccacttataagtagttatataacttattaaaggctagagccactgtgtaatagttactttttttttttgctgctatgataaaacaccatgaccaaaagtgacttatagaaaaggggagtttattttagaggtccctaatggtgaagcatggcaaggaggccccgggaactgagagcccacatgtttattcacatataggaagcagagagggtgaactagaagcaaagtcaggctataaatctcagctctccccaagtcacatacttctcccaacaaggtttcacttctttaacgttccaaacactaccaccaaacagatactgtgtccagatatgaaagcctataaaggtctttctcattcaaacagccacacactactaatggttaagtgtagagaactcctatgcacggcacgtcttttacttaggtacccagtataagtacaacacaatgacaggttgggggaaagaatgaactctgttacactggaacttactcttctctgttggaatcctaaaatattcaggctaaacctctcaaagaaaaggatcctcagggaatggcacaaggaaaatgagaaaatgtggcctatgtggaacagactataatttacttcgggatctgatcattttgtcattcacagacacaatgagattaaagggagggaattacttgaaaaagtactcgtgacaggatgagaggaagaagaaaagcaggaaaggaaagacaacatatttaaggaagcagagttaatgttgagtattcatttcaatagaaaagttgagggacttgcagaaagagcaagcaaggatgatcacatcatccactccccagaagaaacataacaatctggactgcagaagcagtcttgagaatgaagggatagctgaagtgaacaagatactggaagaaaagttagccatcagcatagaaagggggatagtgccaagaagcatgctagggagatggagaaactggctgaggaagacagtttaataatccaggaccttctgaatgagactgacatcaaggtagcccccaaaatggcctaaagagtgctataaattcccactataaccttgtcttggagtttaatgagccaaatatgtatttgcctgctgtctcctgccctaaccttgaccaagtcctactgaattaataccctctctttctactggactgccttggcaacccttttgttcttgctgtactaaaaatagttccagggacaaaagggatgagatacatgaaaggcaacagcttaggatatgttaatataagtctttcttgttcaggaccaactaatccatcttaggagcccctagaactcatgctttttgatgttggcgttttattcaatgatttattgatggctgacccttttactgtatttcataatatgaattcaaatttaacacttgtagtcactctgaggattaaatcctatgttaattctgttgtttactctaaatagacaaaatatcgattgcataattaaaaagttaatatacttagccttgtttacctaagtagcaacttaaagctaagattctgatctgtggtaaaacgtctttttgtgtgacaaatgtgccttgtgctatgccttatttaaagacaaaactatataatttagacatgtttgtcagatacatgaggcatggcagaaacttaaaagcaaagtgcactgtaagttactttaaatgtatgcataacgtgttgttctgttttaatttgagcaaaatgcttattgtcattctagagcagtgctttctaaaaatgttctctacaactatatgcctgacagagtctagcctaggcctagaccaaacctggacatagtgtttccaaaatgtgaaataagaaaataatctgatttgtgccaatgactgttaagagtcatatatatccattggatttgcattgaattctattgttattcttgttttagagatgaaaatcttagcagggaggcttgctctagatcaccagttagttcagagttcaaaatttaggttcagaaaggctgttttcaacagcactcttactttctaagtaagcgggggtgcctctggctccacagaccattaaccattatgatgtgagttgttacaatcattttaggtatagattaaaatattttatggaaagaaaggtgtcctttcatttctctccattcttcaggttaaatcaagtttcattctggtgctagtaggatttgaatctttgctatttgatggcctccttttcagcagttgatgtcaacagtggagccagcaaatagaaaggggctcaggcagttgcaggatcagcttgatttcatggcttttgacttatgatatccatagaggacttttattttaaataaatgtatttaaagtacccaaattgtttaatttaaacaaagtattgaataaatagcatatatggaatgcagctgtgacaaatgaccatttatttttatataattgaagttttagaaacactgtcattatccagcattttgaaactcactgtaatatgacttcagctttcagtggcttttaacctgtaagtttctttcttttctcctgttggaattcccatgtgcttctatcaaagaagttcccccaggctagagagatagctcagttgataaagtgtattgcaagcttgggaacttaggataaatccctgaatccaggcatggtggtacaaatgtagaattcccatcctagggaacagagacagaggattctggtgtgtcctggccagccactgtagctgaatcagtaagccctggtactaatatgaaatcttaattcagaaagaaagattggtggcacctgaggagtgacacccaggattgtcctctgatcacactctagtgcaaacacatttatgctcacctgcacatgttcttgcacacacacacacacacacacacacacacacacacaaagatttccagtgcccctttgtagatctggtgttttcaccagatgttaataatgtcacactcataaagagatcagttttaaatacttctttttcctgaaataattccatccctacattctttgtggttttagaatctccttttataaagagatagtgatagtagatgatagattttggtacatttttagtatctttgatgtggcaaaataaaaacttggaaattattttttaagtgaagctgatctagactccatcatggtctgtgatcacagactacaagggcttttcctgtcactctgtcctgacagtagagcccttctccgttgcctagcagtcttatgtatctcaggaccggtggtatggacttatactaagccttatttctaaagcacattcaagcattttcttcagggacattatttaaaaggcctctgtttgtgacactcttgtgtctgttccctatgtttatagttttgctttccaaaatagctattctgtccttcggtatccatgagtgatcatgtcctactgtttcagacgggcatcagctacctcgttctggagctgtttccttggcttctagtttgttcaatacatatttgcacatgcctaccaccaaagctctcagttcttactatagaaagaaatagaaggttttactattccatacttattctcatccacccctaatgtacaagatgcctgtagacgcctgaactcactggcttcttatctccagattcttcggtgataaattagttttccagttcatgtgcgctcttgctagaccaccatccaatcctgctcttatggctgggttctgagatcagaaatccacccttagcctctgatgttgcaatgttcagttttaaatagtcagaatagactccaggcgaaagctccctggagttctttccgttttgacttgtgccagccatggctttggaaaacagttacaaaacaagacttgaactccacgttcctgtcttagtcactttcccagggaagaagaaagacataaccttctgcctggcacaaggtgggtaccaaagcctgtggtagtgaaggcacagatgtggaccctctcaagtttagaatgtatacatcattatgactaagtgtgccaagctggtgtaacaggtaccaggacatgggcatggatctgccttttagtcttaaaaaaaaatctatcggtggaaaataatttttgttatttgattagagctgtatagtcagccaactcctactgtaatagcctagaccttctataatattttagagaaataggaaaagaaaacaagagtgcatttctgaccatgtttgagagccaggcttctgtcactaagtaatgaagtagctcaagtagccttgcataagtgggaatttgcggtttctaaagctgcccgttcccccaaacgactaaaatatgttattggtatttgactgtttcttatgttttgctctccttaagtttctttttaaaggggtttgagtttaaaagcacaaccactgaaaaatgcaatttaatcatagaactgtgaaaggctaagcccagagttaaccccaggatgctctgggcttttttgttaaaccaaagcttagaatgagccttaatcccagggcatgctagcaagcaagaaggaagtggatagttaggccggggacacaggggatgggccagtctggctgccacttacttaagcccttcccattgggaggccaagcagctgatttacactggaaagaacaagagaaaggaaagaggagtcagtaacagcagcaagagccttggaggataggagggctcctgggtgggagtactgtcacccacactgcagtgcatcacagagtggaaccccaaagacctccttagtcccagttcactttatgaatagctgtggggtttgcctgactagtaaggtatgtgatggtagggaatttggaattgtgatctgttgctaaagagaaagtaatcttttaggcagctgagcagggaggttcacagcccagcagccatctctagacctgaaatggaaagctagtatgataatgacatgaggacccagggaatcatctgccttatacttcagtcttattggccagtaccatagtcaacaaagagatacacaccaatcgcttcttttctctttgtgtagagagcatggcacattcttgaaagtatatcagtgtttaccttgatttttttttaatttaattaaataatcatcagaaatgctggtgatttggaatgcttatataagattccattgctacagttggcttaattttctctctccaccctcacccctttttttttactggctatttaaagatttccagttctttcttattataaagaatatactctgataagcatacttgtgcaagaacattatttttaataataagataaaattagattaattactgaagagatgtgaacttttcaaagtgcctgggatataattataagtccttcatgtcactagagcattaactattgtcatttttaaaaacataaatctgaccatttcatggggagaatggcttctcattgtttggctttgcacacctattctctgttacatataaagctagattttatatgtttattactacatctattttaaatatattttttacctgatagcttgtgcctgtttgggagcaggctatatattttcagttagcatatacattaacatgactatatatatgatattttccctgttttgttgtttgcctttagatcctgtccctcttagttttttgagacaggtttctctgtgtagccccagctgtccttggtcctttgtagaccaagctggcctcaaactcacagagatccacctatgtttgattcctgagtgctgggattaaaggcatgcaccatccctgcccaactgcccttagattttttttttaatgtgatagtttagataaacaagaattttgacctttacatgttcatatccatatatttttctccttttatatttcttctttggctttaaaacctatagaatcctccccctttctcagagaaatatccacctccattttcttgttcttaggtagtttatcagggccaggcatgagcccagggctgatgtgtacaggcctcagctccgcctctaaactgcagtttctaagagtttgttttgtatgttagtaatttagtacatatttggaaatcattttattttttggtatgaaacaaggctacatcttcctccccccctcccaaatagggtaaattacttcagcgttgtttttaataattcatctttcctgtggtgactcttgatgaatgcaccatgttcttcataagctcctttgagtatctgagcaatcacttgtgttccttaataacaacttcaatgccagtgacagtcatttagaccttgtattttttattcctatagcacatgtatatccttatattcctgtcttcaaaaaggttgtgcttgtgcctcacttatcacttatcactctctgaggaaactctggagatcgttatgtcaacccaattctaaattatttttaaggattgtactttctttatgttgaattttttaacatcttaagcagttaaaattgtttatgtggggcttgaaaaagcacatgtatagtttaaattctaggtgactattaagttaaggaattaacttaattttgtagtctttttttttgttttgttttgttttttttttgttttttttttgtttttcgagacaggtttctctgtatagccctggctctcctggaactcactttgtagaccaggctggcctcgaactcagaaatctgcctgcccctgcctcccgagtgctgggattaaaggcgtacaccaccacgcccggctttaattttgtagtcttaagactgagtgctaacacccaaatgccccagatcatcccaggcagtacttattgagtagggcgcagacgccagagctctaccaaagacctgaacatgccccatgtgttaaatgtttgtgtgctttttacagtgcataaccaacaaggatgccaactatcccagtattaaaatgtctttccagatcgattcagaagttgcccgtgttggcctttctggctacccacaaaatttaccctatgttgtcttgctgttcagagagctgacgagcacatctcccaggagttgtaagcacgcatccccctggaagtcctcctgaactgcctgtggtgctcccagggcagcaacttctccatctgccctctattcatagtcttaaaccagaatgccctctggtcagagacttgccattggtttggatagggctgtaatttaaatatctgggtccgaggcctaccctaggaatgtttctgcaacattctgttttagggtttgatgcaaaggttgaatgtgcttagacaagcctaaaattgaagtgacgcaaaagccatttctcttccatgacaggtcatctcttttagaactctggaaggcaccagagcaagaagagagagactgggggtcaaagtcaagtatgctgtagatacaaggtgacacttgaaccaggtgtgagggactgtgtcttaaggaaatagttgtagaaatgaaaacaaaaacagaaaaacaataaacaataaaacagaacaaaaccaagcattgaggtcaggcaggcctgaacataactgcaccttgactcatgctgaaggtccctgatcgctccagtccgttcacttgtctgtaaaacacaataatactgatttagaaaagttgcattaagaactggaaataaatatagaaagcatccaaaagttacaattgataatagcagtgaatggtagctatgatgatcaaacttgtacagggaataagaagcagactaggaaagagcagaaaatgggcattgtgagagaacactgtaaaaaaaacatgggctctgcttagcttgaagggcaagctaaagaggacaaacctcatcctgcagggactgaagacacttgaaggacttttattaaacagatgccagctctagaaagacacaatggttagggcttgggctctgggattcaaactttctacacttccaatctgggcgagctattaatggtccccattggcctgcccgtgttctagttgtatcacatgcattgtctgaagaaggaaatgagttcagatgaaggcagtgacttggggaattaacagttggttactgcgtgaggatggtggttgagtatcgttatttgtatcatctggaccagtctgcattttataagatcagagaggttagagtgactggaatgaagaccgagggagcaaataggaaagttctacctgcatggtttaagggttgccacgcactctggtgggtctgtggcaaagggtcacttaagatttgtacatttgcactgagagggagtttgcctagtgtttacaagaccccaggacccttcccatcactgtgaaaggtaacgtatattccatatacacacatactctatgactttcaaaggagagaactctgaactgcttcccctagtttatcttaactggtgtgccactgcttgaaatttcacttgagcgctcatcactatggaaatgggctgagaaaactaagtggtatccctcttcacttgctgatggagggccaggagctaaaacctctgcagacagccatcccagattctcgtggtctggtttcccccctctttagaactgttagtctttcttctagcctgaggcgacaaggtatttaaggggtatgatctagaggacactaggggttaccctcaacctgctaggaaattgcctgggtcctggtttcctttcctaggactctttcccctttagattttactgagcctctctggacatagctctcttgggcttggtattcaaaatgcctttctctttgaacctaatcttatctttaattgtcctcctgttgtaaaactatagtttccatttctttcttgaggccaaggctagggtgggtcacttaatatgctgactttttcttggattgacagtgaactaggagtaaaatcgttgagttggaaaaatacttcctctgtgcagtagcctcaggagtgtgaaatgagaccttagaacacgtggggaacttaaaccaaaatctaacaatactgtttttctgctttctaaagctatctgttaatataaacaaacaacaaaaccaatcaaaccatcaggcaaaactactacagttcacctagccaaccatgttatcaaagctgaaaaaggtacaggcagaggatgaagccagggagagccagttagaggatgtctgctttaatggggctgcaaagaaaaacctcagccaccgcgagctagatcatagttgggagagcgtaccgaaaacgttccagtgaattcttagaaaacacagtattcatcccaactgattgcctactaactccctgtctagtattgaaaaagataagattaaatgtgcagaattaagtgataattatgtaaacaaaaaccaaccttgaattacctggcattagatatggctgttgactctgcgcctatcttataaatcattctaattgagtgggcagtgttaccttccaaacctgaaaaactaagtagggaacattctgaggaggctgccaggtctccctggatacaagcatcaagtctgccttgggcaagacaggttcactgattgtgtgaaagtaaatgtttttaggaacaaatataaacataggctatacagaccaaaactgaggcaagttttctatattctaataataactacaaatatacatatccaaattgtatatattactgaactagactctgaaccacaaaattatattttaaaatccagcttttcttataccccctcctcccaaaagagcttttgttaactactggcaatctgtgtcttcctgggcaattctatactttttacaaaggtcagtttttaaaagtggaatcacagtgagctgccttcctgaggcttccgtcttccactcagcagcccagctgtggccacctgagcatctgtgggcgtttgggcacatatgcacattcagtactaataaaggtttgcctccttctcctaattggctgcatgctaggtcagttcagttaacttaacctgcatccacttactgtcattgctgtaaggatacatgctggtatgagcactccacattttctagaactctatgctaacttcacagtttcattttttcattgtgaagtggaacatctttttatatcatcgctgttacctgttaaacttatatttaattaaattattggtctatttcttgttaattaggaagagaactttgtatattgtggaaattggcgtgtttcatataaataaatattttcctgggttttgtcattttattttgtaaataataaactaatatgtttttatatattaagattcaccacttttgtagcttttcaaagtaaaaagtatttattttacatgaatattttcttgaatacactttttaatttttacaatacttttatggctttcttttgtatttaaatcttcagtttttcaggaactacaatttttatgagtttagtaattcagctttatttttgctgttgatcactacccagctgccacaacatcatgtattggttaatttacctgtccccactttattgtgcactgaatttccatatctgaatccctattttgggtcttcagagacctaggtacagacaccatcagcaagccagacactcctggaaaaacaggatgtgtaggaatcctcactttggtgagtagtgtttactgcccactggcaccttgaggcagagacttagaaatcaccagcggcctcagacaacagcatgaacactcagagcatcagttcagtttatatgtggggcttgtctctcttcatcagtgacctggagatttattagatcacagccttctagccaggaactcactttaatttctcatttaatctctggcattgctggcccataaaagcagctgagtaataataatgttaagtaataataatgttaagtgcttacattgtacttttcattcccaaagtgctatctaaacattgactaattagatgccttgatggacggcgcttgcagaggcgaccgggatctggttgcacacctgtgagggaccgctcctgaaaagccctgcttctctctttgaatggcactcagcaagcaggagaataaaaaagctgctgacattatttcacttctgttgaaaatgtcctagggtatcttctaattagcctggttaaactcaccttttatctgtctccccagatattccctttctacgttcctggggctattcaactggcctcttttgatgtttccccccatggttaatcacaaaatcatagactcttcaaatgaagggggatccttgttgatcatttagttttgaatgatttagcacaatcactctgttttgtacaagaggaaactgaggcatggaaaagtacacaccctaaggaaaggcttttagctctgcagggacatcctgggaacagaaaccaagattgctacgtcccattctgagtctgtgtaccctttcttctttctctctgcaagtgcctgtgtttcttttctgttttcttgacatttctgctcagtctttgctctccctctcgctgcccattccttctttgctttccacttgtgggtctctcctgactcttgcagtccttctttatgtgatctctctctctctctttctctcactccctccccctttcagtgcagtctcttaaaacctcatgttgtcctctactgaaagtactctggaaactcataagtctccaatttccctatatccatacctacatagaattgccttttttctctctccagttgtatttgtctctcctggagttcaaccagtaatgtgtgagattatctctatattgaaaatccttcaaaagctgtgaccatttaagagaatttttgtgctgttgttcccttaaccaaaggtaggtctagtatagatcaaaactattaatacagcccagcaggccttggtggcacacgtttaattacagcagaggcaggtggacttccttgagctcaaggctagtctagtttatatagtgagttccaggccagtggactagatataatgatgatgatgatagatataataatgatgatgatgatgattataatgatgatgatgatagatataataatgatgatgatgatgatgataataataataataataataataacatacttacatgcatgcatacatgcatacatacatgcatacatacaggcaagcaagctgggtctcctagattacatttcctgcttttacgtggaaggcaagtaggaacacagtgacctcagaatgcctgcctggtcacagcctggcctggcctctgaccccttcccagttgtgaagcacactgaagagaggaagacaggactgacactgggaagctgagtgattgtttccctctttgggtcataattttttgtttattaaataataagaaaggtgagtttaaatgattatttgggtctttttctcactatttaaggcaataaactacctcagacatataagtaactcagcagagagcagattctgctggtcatcctggagaatttcctagaactgtctaggtttaaatacttacagctatttcctgcacatctaatatggagactacttagccttctagggcttaggtattggagctgcataactgtccttattctgcaagagcttcgttcatactcatgggtgtatggattgacagtcttggacacatacagaaaactgtgtgaaatagaccctgtcccattattagtaattttttattctgggtttatcttgactatgggagaaaatgggattaaaatccctttgtcttttattctttaagactccagcaggaaacaaaatgaggggaatgattatgaacactcacaaatctacccaatgacataagccacatcaagttatcacatagtttccaaagttttaatagaaactgtcacacttaggagaggatcagataagaactctttggtggtatcataatcctccctcagtacaatgactgataagccaactcagccctgttgtgcagtcccgcggtggagtaaggaaggtggcgctggttagagaaaagagttttgttcgtggacacaccaccagctccaagccagaaggaggagctcaaaagtgaagtagaaaagagaagagaggtttgtcccaacttcatgaagtagcaatccctatacactttggtggtgtgcatctctgcccgtgaggagctgtgagtagcatttagaatgagagtacagaatgctcctattgtgggtcaggtttttaagcttgagcaggatctaggtggtgttttgtgttttgttttgaaacagggtctcactctgtagctcacgctggcctcctgcattcttgcctacctcctcagcctccagtgttggaactatagacattgacactaacttagctgatgtaggtcactagacccctctctgtgtgcctataaatgccgagaaatggcactacaaagtacaattgtcataggttatgtagccaagaaaatgcaaattgaattatatgagaagctgtgttacagcacatgacaggataggatcttgatttcattgagcctgcctattcctggtggatctgctcaacatgaactggatcttctaagtaggcttttatggtggaatcatttttatccagggcagacgacctctttatcacaaaattcccagcagttgtccagaatctagatgttgtataacggccaaggaatgcttgttttaatatggggggtcatgtgatgaatcagaaggaaaacattagtagatgcataaaatacattgaaagcgcctttttcctgtgtgacttcttgtcattctcttatcctggtctatgttactagtttcatcccccatccctgtagatcatgaacttcataatggtgccgtgaaggtaaacaacataaaagagtggtgtgtgccccctcttccaatcccacagatcgctattggctgcagaccttgaacatgacactgcaatttcctggtgccacacatgagtaataagcagctgtttctgaaactgtggtctgcagaaggcagtactgggttattttttaacttaattgtaatttttgattggtctgcaagaaagtaaatcaaataaaggctgttgtcttagtctgcagaaagccttaggcctcaaattccaatgctgaccattgtgaccagaatagaagaggggaaatgtgtgtatcccaaactggaagttcagccaggcagcttttatgggctgcgtttgcacccagagagttaagcatacttggtattcttctcagatgactgaatcatgtaaagtgagatttgacagtctctccagttatgagaatatttgagatgatttaagtgaatttttaaaagggaagtctagttgtcagcttgatattacattttgttcttgtccaacagcacaataaaatgatataattttaaatcccagatggagtcatctattctttaaacacccagtcagtgtgcactccccaagtaaacaggtcgattggtacctttttcagtacaagaaattaagtctaatggaaaacagaaataaactttgactgtagtttggatgtctgccttttctcaaggaaaatttgggtacgtggagaaagtggatgaggttgactacagagggcaaggaggcgggtggaagagctacatatgtttcctgctaattgctttgtcctgagattattcacgtagacatgcagtttgcaggaaataaatggaaagataactaagcctcatcccacaggtccactgtccttgttacagagccagttggccgtctggttgtaaatgcacctgatgctggagatgaagtgtctttccgactcttggtgggttgttacagttagatttatctgtgactaacttacttgcaaattagaaaggagtaagagacaactgctggctattactaaaatgtgatttaatcaagtttgagatatgccaagtgtctctccaagtctttagccttggccagagtgagatgttcacccgtactctgttctctgatggacctgaacaatatcagcggcagaggatgcatctactgcccttcttcctgattgcatccgaacagaagaacaatgtgttaccttttgaaagctgacatgtgactgtcatacctttctttcatacccttgctatagacctaaagtatttgttagaaaagtaatttaaattactgaagattttatttaaattgagagaaggtagcagtcactgaccaagtaccatcagacacagtgcttcctgtgcccagcatacaaagcctgatcctttcttcagtcctatatgtaaatattagctagttttagttgaggaaactagagctcagagggcttagtaacttgccagtctcccagctggaaggtagctagctatcgtttgagctcagaacagcctcacagtacgccactgcctcccaaagctagagacaatgaggtgtgatccttaacaggagctgtgtgctctcagcttctctggaaaccctttaatgaatccaactgctctgcgttgaaaagatacatctaagcaaacctgcgccatctatttcctctttttaactatctttgaccaattttattaagaaaatgcttttgtgctcacatcagtaactgtaatactaggaggctgaagcaggaatattgtgagtttaagaccaggctagtcttagagagatggctcagcaattaagagcactgactgcttgctcttccagaggttctgagttcaattcccagcaaccacctggtggcttacaaccatctgtaatgagtatccaatgccctcttttggtgtgtctgaagagagcgacagtgtactcacatacataaaataaataaacaaatcttagagagagagagagagagagagagagagagagagagagagagagagagagaccaagctagcctgttacatggcaagatcaaaacaacaaccaaaacagaacactttttacaagtcaggtatggcatgctcccagttacaataaacagctgtaaactgtagcctgggtagaacattcgtctttgtgttgaactttatggaggactgttgtcactcagggaggcacactagttcaggtgacagcagaactcagttctcccatctgactttcctcaggttgtgtactttttggacagaataccctcccttgtctaactgtgccttgcacattctgtctggggtggggtggggtcctgaaagctgtgtactggtcttcactctcagcagaacactgagggaatagactacactttagtcccatttgcggcaccatcctcctagtgctttcagaattgggtcccaacttaagccacacccagatgactaggagatggaattcagaggtatgtggccctgaggtggtagagggaagctgtggatgggcagcagattttgagccattatccacagaaaggcgtgtcttatattttaaaaggaaccatacagaacagcacacatggagcacactttttatacttagtgcagcctctagactagaccataatagccaagaaatcctcttcccagggctgcctgccattgcagtcaagggcagaatagatcctcgtacctggaaatatacaagtataaagtttttcctttccataatattaacgggatgtttataaattctaaaattaacctgagaatattacctcactttctggaaaaagtctttaagcaactttagccgttaggaacatggctacaaaactgagatgacaaaagaacagccaatcaagcacaaggtaagaccaagtccagcgtgactgaaagagtttgtgacctccatacaaccccacattcaactgcaggcagcaacgagacacaggaaggcatcgtcactcggctaacaggaacttgggtgcctggcagggagggaggatttcagtgaggctcactgcttgccactgagcagcttattctctgaagctgtcccatgtggaggtgccaggttagaggtaagagtgggcagatgttctcacgtttgtatgctacatatgtaaatgctcaacacaccacaagcaagaaggtcaggtcaatagcagtaaagaaacgaacagccttgagtttcaggttgctttagacagtgtgaaagtagagagtctgtgaccgttgtaacaaaaaatgaggttttggttgaagtcagaacagatcagagagccgcagaacctacatgaaatctaaatgagttgtaagatgcaaagccccgtcctcgtagaggaaattacctagaaggacaggaacaagagcaagtacatcctgtgtcaggcagagggctcacaactgaagatgcccagactgagcatggcagttgggttggtgtgtggactcctgtttggaggcttgccaagcaggggagacataagtctagttatacacagttctcatgtacccagcatcagggatatggtaatgtagtaagattctgttaaatcagggaagggtttttgttaaggataaaatgagaattcactgaagacttgagaggtgataagtaatgaaaatggcttcaaaaccgtctaatgcgtatgtttagcagattaaaggagaaagatgggcttctgggattaaagctcaggttattttgtagattaagagagagtgctaagaatctggagactctgccgggcggtgatggccaacgcctttaatcccagcactcgggaggcagaggcaggcagatttctgagttcgaggccagcctggtctacaaagtgagttccaggacagccagggctacacagagaaaccctgtctcgaaaacaaacaaactaacaaacaaagaatctggagaccccacttaaaaaaactcagcatgaacctcaaaacagtatgctgaatgagagaagacacacacacatccatacatgtagacattcacactcaaacacacgtgcacacaaatacattgtatatggttctgtctctatgaaatagccttatagggacagatggtacattactggtttctagaacttggggagaataaggtaaaaagctagtggagccctaactactatatatgggagctagaaggggagctggggaagttctaaaagtatatggagtaaggcatatcactctataaataagccaaggtttaaatttgagtggctgaagtgtgtggtggtgacttatatcttaataaagctgttatttcaaaaaaatgggagaggtaatcagtaagatatgatgaacaacagatagtgtatcaatgtttgatggaaataaatcaatcaaagcaactgcataatttccagcttggctgccaatgaaacagcaagaattgccactaatactattattactttaaatttatgctttcagaataccccaaagaatcatataaatatgactatcatcaatgaaaatttggtagcatgattctctgccactggacacaaatatcctaatctagcaatagctaaaataataataaaaaatttaatgttgatatagcctaaaggtgaaaggaagtgacttcagagaggataaactgattcttattagtaataaaaagtgaaccgtcagtaacatggaggtgtgttgggggggcgggggggaagaatgtgctgtgacaggagactattaatttccaaaaggtcattagtttccccaaatagggataagtcactatccatatcactgtccataccaacttgatgaaatgttttaggagccttcagaatgttcatacttttgtcctgataaattctagatagagaaaaacctaggtcatgatgctcaatctcctttagatccaggtcttctcatcacctgtactcacctggttttcagaccatcctaaatcctcagcccgttctttaaatgagtcattagtcgtgactgattaagtaagagaaaggaagccaaactcaagagaattgctatcacagtgtagaagagcttggtggttggatatttcctagacagcgtgtatcagatgttggtgttaggtgcgtgccttcctggggttgttggagttaacggtccctgagagaacagaactgaaacaggtctagtgtacctacagctttctgtaggttatggagggaagtgatgtgactgcatgctggcctagctcagaaaacagccactgtaatctctacctccctgttaggaaaagatctatctctgaaaagcagtaaacttgattttatattcactttttgtatttcagtgcaaaataatatacattccctactatcaaagtcaaagacccacagtaatacagagcagcagctgatctatctgacttgttcctcccgcccaagttaacagttgctgaagttgttagcatcatggtcttgttcctaaggcttaaaatgcttctccacttccatctctagtgtagcctcattttttttcaataaaggacagattacttttctcgaagtcttactgtgtctctgttaggtgttagttggaggtaaaattgtcattttaaactaggcacttatttgaaaaaaaaagggggggtacccaggtagctattgttatttatggcagtccctaagttaatttcaccttttttcctgatatcaaagtcagcccatataagcagacattaacggtacagaaataaaaggcagactcactgttattgctgtgtgaggtgctgaagtctttgaagcccatgagcagtagttaagtgcattagtaatgtagttaataagtgactgccatgagttccaaactcatcaatatttgcaggccagcacatacggtgacgggaggggggcaggggggggcattagaggcagatccgtggctcgtgctgggatcagcagtctcgtggatggcccatgccttgtgaggagcacacagtgagtgaggctcatcaccatgctggaattcaggctggttttgtgaggtcatctgtcttttcagaagtagacagatattttttggtttgtattgttcttaatgtaaaaaccccatttttaaattttgctcattaaaaaaaaaagaaatgtaaaattaaatactgaaagtgaccctcagaatcccaggttacaccctttttaagttattatgtttaccagcaacatgagaaacccagttttccttatttgttgtctgttcctaggggagagagtgggagggagtggagatgaaatcatattaattaattagaaatctgtgctgctgacttattcacataagcatcatgcctatatttcccttcatgtcttaaaaacctgcctgcctcccttctcttctgccaccccccaaccctgaacttgtctcctcaagtggggttcatgctcctcaccacactgcaaaaccagaggaacacgaaagaagctcgctcggcatcttcattctcaagccccagtggataagcccactcttttggagcaaagcactgggcctagtcccccttgagctgctgggaagttataattagcggttttcctgttgggaaaggagaggagccctttccctcccttcccacatctgcaaggctttgtgttgtcaatgttcgacctcctggtcttgtttctgtttcctcaggtgatagagggaaagctggctccattcttgggaaaggtcattaaattcgccaccgcgcatgtctacagctgcagtctctgtagccagaaagggttcatctgtgagatctgtaacaacggcgagatcctctaccccttcgaggacatttcaacaagcaggtacagaatacttccttctacggaaatgtttttgagagtcgtgtgtgcttttatctggctagatcaggataattctaagtattgtctctcactcactgaaagtcaagttttcccttgtttctgtacagcagttttctccccttgcttgccatttagttgcgatcctcactctgtctttatgaagaaggaggtagcattgctgcaaagaaatgctgtctcagctgtggagcagaaactgaaggaaaggccatccagtgactgtcccatctggggatccatcccatatacaaccaccaaacccagacacttttgtggatgccaacaagagctttctgacaggagcctgttatagctgtctcctgagaagctctgccagtgcctgacaaatacagaggtggatgcacacagccatccattggactgagcacaggttccccaaaggaggagctagagaaagtacccaaggagctgaaggggtttgcagctccataggaggaacaacaatatgaactaaccagtacccccagagctcccaggtactaaaccaccaactaaagagtacacatggtgggactcaaggctccaattgcatatgtaacagaggatggccttgtgggacatcaatgagaggagaggcccttggtcttgtgaaagatcgatgccccagtgtaggggaaagccaggacagggaggtgggagtgggtgggttagtgaagggaggggggaatgggatagggggttttcagaggggaaatgaggaaaggggattacatttgaaatgtaaataaagaaaatatctaataaagcattttatcaaagaaaaaaagaagaagaaggtgcttcaccgaacggtcacaacagatgataaaacctgcagttctccttaaagaagttaggggtaaacaatacctctggtattggagaggtgaacatgttttcataacaaggaacagtgatccattttaacagccctaaagttcaggcatccctggcagcagacaccctcaccattacaggccacgctgagacaaacagctgacagcaatgcttcccagcatctgaaaccagttcagtgcagacggtgtgagtagttcaaagagaccgagagaagctctgcccaaacaacccatggatggaaaagcacctcttagtcctgcagaggaagatgatgatgaagttccagatctggtagagaattttgatgagacttctaagaatgggcaaactgaatcaaagcaacttctgaagaaggcgacacttgcaggagttacaaggagctgctattttatatcatgaatgctttaattattttaattttttatggatctgataaagtctagaaatatttttaagcccaagcaccgccccccagacactgcagtgcttttgggtttttgcttatacctaattcattcttgcagcaaattaagctgaagaagcctgggaataaagtttggaaaaggttaattaaaaaattaaaattaagtaaaaatacgttatattttcagaaaggaaggaaggaagatgctgtctctctctagtttactaggtaacggagtgtctgctcagattctgtcttagaatggagagcggccaggaaaatgcccacccagctttccagagcaacaggggaaagaagtgggaaatgccccccttagaggaaggccaggcctagactgactggtagacctgcaactcaacgccctggtggggagcacactccccacagacagcagcagaggtgaaagttttcaggccctaagagagaaaagtaggagttcatgtgggattcattttctaaccaaagtaatgtttgggcatcaacagatcccctgttgatagatgatttttccctctaacttggatcataatttctactatgacttctccaaaatcacaaaataatacatatcacttttccttccatccctgaatcataatagaaatactgtgtgtatgtgtgtgtgcactggcttctttggccacgaatgtcatggctcatttccgccctgcagagctcacttacactgtggttcagagcagaaggtgaggccaatagccaggagaggctcagcatgcagaacagtgagcgttggctcagccctcttggccactctttaaacccaacggctatttgtaaacattgaagaacttgggttagcctgtgcatagaaggacaaggagatacacgagttcagattccagtttcctgagaatgggtcctttgttctactgtatagattagatgacttttggggatatacactctaacctaagaacttctgtacaaagttcacagcataaatatttataaaatcataaaaaagaaacttaatgtttatcaactgataaagaaacaaaaattggtgtgcgcccccagtgaactactggttagccgtgaaaagggatgtagaattgttccatgttaacagatgctggatgcgaagacatgttatatgattctctttttatggaatgccccaaatcagcaggtcctggggcttgagggcttgcgggaaggggtaaaggcagacttgtaatgaacacaggggattttgatgatgcaaatgtgtagggtctggattacagtgatggtcacataatcttgtggctgctaaaactttggaactagaggccttgagggccaagttttctggcacatattgtgataaaaatgaataataaaaactaagggacttctgctgaataagccagtatgtcatatcacaaaacaaatctcaatttggaaatatatcatatgtattttctagtacatagaatttaaaatctacactaggaagggacctggcaacccatgaaaggtttggagcctgagcagtacacttctgaatcacccccaggttaaaggggcagtcacaagagaaatgttgaagtatttttacatgaatgaaggtgaaatcacagagatgtgggataaggctaaggcagtgctggccagtgggcttgtccagcctgtgcctggggcccacaggccacacaaagctacatgaagccaagggcagctatgaatgcagcccagggcaacattgtgaacttgaagcattgtgagatcgatttctttttgtaactgaggtgtatggttctcgagcatgaacctagcagatgacagtgtcgcatctcagtgtcaagattaggtacacggggcttcacgggacgtggagctcaaaacgtctatgtttggaaaaaaggaaaggaatctcagtcaggaatctaaacatatacgttgaggagctaacgaacaaacaacccaaaccagcaggagatagaatatagattggaattcacagaaattcaaatagacgtaataagcaagaaaatgactgattttaaagcctaccaaataaaggccacatggcttcatatgtgaatcttattgaataattagaaaaataatactattgcttcacacaaaaacaaagaagctgattctaaaaaataaaaaaaaaaatgacttgaagacacacacacacacatacacacatatctttaacacatactgatagaacttcatggagaaataaatgagtctacagtaacagagatgtcacctctctgtaaaggacagctccaccacgcagagtctccgagcaagtgtcttcttaaaccaaacagcactgcctgtatcagggactaactgtcatcttcagaacactagccagacaacataagaatgcatgttctgctcaagtgtgtgtggagcattcacaagagctgacattctcaggcataggacacacctgaacaaatcctacccactagaaaccattgaaagtacattttcagatcatgtattcaacaagacattagtaatggggtaaggggaacggctttgtaggcaagagtgcttgctgtgcaagctacaggacgtgactttgaatctccagtacccacataaagctgaacctggccttgctgacctgtaaccctggtgcctggccttggaggagctaaacgaatgctgagaattcattggctagacagcctagctgaaatggtgagcttcaggttcagtgagagatctgtcttaaaacaatagtggcgaaagaaagaggaagacatccatcgtcctccactggtttctgcatgcatacttatagatacatgcacccccacacacatgtgcacacataccacacacacacacaattggaattaacaacagaaaggtgagaaaaatccaagcacatttggcaattaaacaaaaaaacttacaaataacacgagttgaatatgttcatccatatgaaagcatacatatgaatgtttatacaaactttactcctaattatccaaaactgtaagcacccatgaacctagcagcaggtgagttgataaacaaaatgtaatatatccatacaatggaatagtagttcccaatagaaggaataagcgtgtgggctacaaaattctgtgacattgtagagaatgggaaatggtagagatggtaaagatcactcgttggtggtcagagttctcgacttgggaagagtagctaggtaaagcaggttgttggcactcttctgtgtgatgctgtaattatgtgaacatgacattatcatacacatttgtctaacccatgggccatggataaaatgtcagtattgagctgttcattgcaacaatgctacactgcctcagtactgtcatataataaggaagatggatgctggtgccagtggttcagactaaggaagctctgctcactgtgactgtgactctggaacggttgactccaagatcaaagtgggatagttttaagcagactttattagaacagaaaattgcaaaggtagtacagagttccataggctgcacaccccaccacacagttccggcttcctcaacctcacatgaggacattgcatcagcttggatatagagcagtgattcatcagtagctaaggtccatgggtttgggttttggagttttttccatatttccttagtttttgcttcatccattttctattctagaatagtactttacattgaataattttcatttttcagaactttattgttatagactcagctatgacagtttcaaacactttacctattttgatgatcttaacagtttagttttgaaagacacggttgggggtgtctgggtttgttttttgttttttgtttcttttcaagattagactaaaggcaagcatgattgagcatatctgtaatcccagaaattcaggagccaaggcagaaggactcacaaattcaagacatccctgagcaatataacaagttccaaccagcctgggcaacgataagcaagaaccaatctctaaaaacagcaacagcaaaattagcctaggctttatgcttttgggctggggagggaagaacatgtaggtaagctagcatttttatcacatgtgacaagcacggcaccttcctggcttaccactgcagggttggtggcacactcctttgctgtaaagttactcttcttctccctctcatgtagttatctttgaaaggagtcacatggatctctctattgagaggttccacctgcctgggagcagagcatgcccagaattgtttgcagtcctgctggggaggtctgtccttttctctcattcttttttattattttttttaacttgtttgctattcttgtcagtgtagagtcatgcgtggttattttgtaccttggggtgtacagtgttgattattgttcaagctttccagctttgcacttaagctctgcattggctccaggttcctttgagatagctcaaccattgtgcgttttgtttgctagcttgctgttcatcattttttccttcctggctgtaccagatgattcaggctcctgctttacatctcttaccctcccccatgtccaatgaggccttcccctttcattaagaataaccacagagatgacgatctgagcatgaggcattatacatttttaaatgccacgtgtccttagactcatgctcttgacatgaattccatacagaatctgctgtaaaatttggtttacgtctaaaatctattaccttcgaggatattatatgaaagactatattcaaagataatatgactgtcaaggctctgaattctcaccaaaatggcctcattatcccatgtgagaggcttctatccagtggtactaaatctgtagctatttagaatcctcattccctgctggtcaccggcagctctcgcagcttgcagagtgtgagatcaaaaggaaccttgagcatctttcctagaatccaggttgatgcttctcagggaacttcctcttagtgtgccatttccagctaaaccctaagagcagtttatacaagtctttaggaaaagacaaaagaaaaatcaaaatttagcagagaaaactttgagtgagaaatacatgcccatttgtggaatgtgataaataaatgtgataagtaatttgaataatgagatcaatatgtcactgagattttgtaaatgaaggaatatgacacatgagattcacctcaaaataatctccctatggagtgaagggatagacataagtgagagaaaatgccatgtcagcaaagttgaagctcggtcatagatacacagggatatattgtgccgtgctctgtatttctgaatatatttgaaattttccacatctatattttaagatcttggaaatgagatacttagtgaatttgtagagcctagttttattttcccagtattatagtttaattttacaaaaaatttcaggggtaagcagctggctcagtgagtaaaatacctgacatgaaagtacgatgtcctgagtttgaagcctaggaagccatgtgagagctgacttcggtacacatacagctagagcctcaggtttctatgggatggagtgtggagaaagatgaacccccagaaccctgccgcagcaaacagccaatacaagatccatttcaagccgggtgaaatgtgaggacctatacctgactaccacatatgagccatctcacacacacacacacacacacacacacacacacacacacacacacacacacacaactctcacaatattagaactactttctcaagaaacgatttcttaagagcattaccagtatacagaaagccagctagagatacagtgaatatgcatgacccttgatataatatagttttttgggacagaagagccatgagaaagttatattaaagcatggtcagagctaagtagacctagacctcatctgcgtgagtggagataaaccattctgtggtttctgtgaaaccttgtgctgctctaatgcactgactttggtaaatgggttttagaatatactgtatttatattgcttttttcaattatgaccatatagcaaacattggtcaacttggactttctttttcttaaatcattatctaagaggatgcttcctgactaatctgaaaatatgcccttagtgtagggtttcggggtgtagggcatctcccctagaacatgtagagagcatgctggaatcatgggactggcattaactagcactcgttctagcagtttactcatggcagttctttcttctgcctgtcctataagtgctacctacctctgttttaaactctatttagtttgtgaacatgtgtgtatatgtgtgggcacttgtgtcttaaaacatatgtagcagtcagagaacagacagcttgtgggagttctctctttctatcacttgggttctgggaatcaaactcaagttatcaaggcttggtgctaagtgactttatgcattaagccatctcctggcccacctctgctttaatgataagaaaacctaagttcagagaaaacagtttacttgccctaacagataaggcaaaacacttaacaatatatgtgactcaacatccacgctgttcattacacactactgcttcttctgtaagacttctttgaagactggctgtagtcttcaaagaagtctgcagggtacaccctaagagtaattataaagatatctagatctgcctttaaaggtacctccgtaaagatgtgcttctcaattgtccctttatttgccccaggagtttagacacctggagcagtaagccatggcagatgggacggggcagatacacatttctgttgttaagtggaggagtggctattgtgacagggataagagaaggttgataccgtgcatccctgggcagtggggttatccatggaagctaagagtaccttgccttaactccagattgctacactatcccaagcttctcagacacaaatgaaacacctacacccccttaactaagaacctcttaatgtccagacttcaagatttgaatacaatagaaagaccattcggtaactaagcctcatttacctgtgagaggatacaagggaagcaaggctttaggattaacaaacattccgttaagacaatggcaaaaccccacatcctagagaaatagaaacaacacactccttagaaaatatgaagtaaacgctccatccctaaagaattacaagtcagaagattaacagatactgcacgaagacttaaggagaaacaatgagtatgcaagcaaagaagccacataagtccacggtggcatagaacttagatttttttttcttttaaatctttaaattttctcctatatagctttctttccatcatctccacaccaaggcaggatgaccttctgtcctgtgccattcggcttggctaaatttttttttcagatgacaggaaagttgtctccactggtatttaagtagagaaagcatggcactccaagactctttgaccagtgtacccttctgagctacatccagatgtggataagaagattctatgcttagaaacaaccttgagtttagcatcctcattgtgtatgcattccatagtgttgattgtcctgttacttcatgaatgctgacatgtttcaaatgaaccaactagttaagaggatctgaagggtttcccagtctatagcagcattacagaagtgtgacacagaccagctcagatacaaggccagcaacattggtctgtccaactcgcctttggaaaggcatgagggtgacattcttcctgtgtgtcctcagggcatctgcaactctggcgttattcttctaaaagggtttgttgttttaagttaagttttgaatataagacttagtcccagcactaaaaaggaagagactggtgatctctaagtttggagccagtctggtctacacagtgagttccaggccagtcagagcttcctagtgagactgcatctcataaaaaacaaacaaacaaacaaataataataataataacaacaacaacaatagtaaaagaaacagatggattgaacattcttgccagtttctctttgtgttacgtgtagttggtttctcctccaagaagtaaggatggctcacttgaagttacttacattgaattctcaccagttgtactaacacacactctcactacatgccgtcttcacactgtagaagaactttccatgttaccttgagaatgaacattgtcctcaccgaaatgcccatgcaagtgaggctccacacagaactcatcatttctgtactgagatgtattgtcaggttagttcatataagaaagttcccaaggaacttaaacctgaagtctgtcactttttcctatctggtcagactcaaaatcatcatttccactaaagggtgtgaagaatcttcctagtatatgtgacctattgaaaatgctgctgtcagtttcgattggcctgcccgcccctatggactggaacttgttgaggcatagatactgttctttccattggagctttttgcccttctttatccctcacgtacacatggagtcccaagtacccaactgcaggcaaacctgaacaaagggttgttatcaaaagtgacaaggaagctgggttgtatataaagtgctgaattccttcctcccatggaagaagcttaaatacagaggttgtttgtttgtttgttttagcactgcctgagcagtggcattaaagtcagtgcattctgatcacatgtgatggtgcatacctttagtcccagcagaggcaaatggatccatgtgagtttgaggccagcctagtctacattttgagttccagaccagccaaggctacatagtgagaccccgtgtttaaaaaaaaaaaaaaaaaaaaaaaaaaagctgattattttcggttgttctatttgcatttttacttgcccaccaacagggcatatggagagcatctatggagagtaaatgtccaataaagctgtcacatatgtgccaaaataataaactgcacatttgccagcaacctggcaaaaagttttccatttacctagttcagttcattatatttttaagagaattgcgtgttaaatgtttggtctgcattgtggggtggggaagggggcagggtacaggtgaactgagcttgagagaagaaagaagtgctatccagaagcttcgagtgttccacccaccgtagcttcctatttattcagccttcatttctgagagcccttgctcaaacagactgaattcctggattatggcctcatgtggacttaaatacacacacattacataccctgttctcactaatcagcctgacacattcctttgttggtaaatggttccaaagcaaacactgtcagtgcacctaattaccaggtttgtgggctgtgcttggcagtcctgttacatcctgttcaacaacagagggcaacagccttggctgggccaggcttaaggagggaagaacttacccccaatgtctatagtcttttttaatgatatttcctttctgtggcttttcttgggaagcagcccacttaaggagtattgtaataaggtgtgtgatcttagaaagagccaaaggaagcctgggctccccttcctaggtgccattcctgcgaaaccacccgcttctgtctgctggctgctttctgactaggactaaaatgctgggcactttgttggtagccctctaacagacccttgccaggatttagaatcttcaatgtctatagatggaagggtctctgaagaggtctctgagaggagaacagaccagaaagctggtgaatgacgggagagagtaatgagaaccaatatgcagttcttctcttctttagtctcctggctgcccacccatccttgtgttgatgtacttgctgtgtccatgaatggttgacttgatttgaaggaaagaaaacaaacttttcagcacagtgctgggtggcttggcagcggcatcaggcagacttttattttcttttgctaaaacaaaaaacaaacaaaaagaaaacctatattcaaataataacttagcatataacattgcaccatggctggctccatattctcatgtctaaacacttcagaatgtctgctaacagacaaaacctgcatgaaatacttgggctgaccctaccctgtatggccttaacctcttgattaataaagcacatttataactacagtcctcatggttgtctcagtagattgctgtcaagacatgttcccttactgagtttctagttaggtatctaggttgcatggccttgtctgtacacattccggatgacctaattatctgttgcttacagaagaaagtgaccatcattgattaaaatcctgtttttatttctaattgtaaaaagaaatggtactcactgtagaagacacaaaaaatataaagaaatttccatatgttattatttttctacacatattatttttatatttatatatgaacatatataaaataaagtcatgttgaaatgcagtcctatatctttcattgagcacatacctctggctccaaatataatcatatttaatctataaatgtttattggtgagttctttaattgcttttaaaaatcacaatatgggctggagagatggcttagccgttaagaacattgactactcttccagaggacctggctcaattcccagctcacacatggtggttcacagctgtctgtaacagcagttccaggaaacccaacactctcacacagacaaacatgcaggtgaaataccaatgcacatgaaataaaaataaataaatcattaaatcaaaatatattgggtgaaaaaattttcaattagatagatagatagatagatagatagatagatagatagatagaagtattagggtccatctaattagtagagacaggctagttcatggaaagaccaatgggaaagggatgtacaagaatatacatcattaactgtgccacttggttgctacatgacccttgacatgccaccacccctctggacatctcagggagatagtaccaattaacaaaaggtatgagtgggaggtttttctagtcctgagatttagcatcttaatatgcatattgaatatgatgttttatatattgttctgtataatatccaagctgactgattttgacacactcattactctcaaggagcttaagagtcaaactcaaactgggattctgcctatcactttgtaagatccatttaaaaagtgaatttgttctattcaccatactgccccgtccagagctgggcagagtaactaacttctcaatgagtaattcatgactgagcaatgagtgaagcactgagtctctttattttaacttattcacattacacttaagtggttttgaagttttaaatcacagacctttaaaattaactttcaaacgattttaggaagtttttatttaactagacattaccattatatgtgactgtttttgagtattgactaacatcctgtcatatattagggacagatgtgttttactggggcaatgaagcctctaaaatcaaagagagaagatattaaatgtttgagcttggctaaactactcagagaacttaatttcagaacatcttttatgttacttctgttacttcttagtgtatactttttcttccccctgggactgtaaataagtaacctgaatacacaatgggaagacaggaagtgtttgcctttccatacaaaaaaggttgactgtgtagactgagcagtttgttctgaaattaactatcttgtgttcttacaaaaggtgcaaaagtagctttgttttgtaatgtatgtttgtatgttgtgattattttctatacaatgaattttgagaatagacatggtagtgtcattaaagttgtcatttaaaaaatctttttactttaacgcctcttctaacacgctatcatattaccatatctccattaagtaccttcaggactgactattgaaccactcaacagtgctgcagcagtaaacactcttattctttagccaacactagtagttatctcttccatccctgatgctctcaaaaaacttaatatgcacagaaagacttagatactgtacattctcattttatataaatgttgctatttggaccaaagtgtaccagagcatagagctcaagagagccatggagaaccagtagtcacctgccaaggatgcgcatgcccaacagaggctagaaacacatccagcaccacacctaacaactcaggagctttaggccactgactctcgtggccttatctatcttaccgttgccagagcaccagccctgatatttggaagaaccacaagaccaacttatggaatgggagactgccaccctaaactagtctcatctttggtgtggttgccagtaatttttgttcccacaaccaatggaaagaatcatgtagccctttaatgagaaaacaagaaaagatagcaagatagatagatagatagatagatagatagatagatagatagataaggaaggaaggaaggaaggaaggaaggaaggaaggaagaaaatcgggaatttgtgaatcatcttacaataaaacagtaacatagtagacaaatgtgaataatgatcctgaagctggtccagacccagccttggaaacatacaaagccactgagcttgcatagatttaatgtaaactgaagttctagcctgggaagacgatgaagtgggatgcagccattctgttagaagggagttcacatctactttcttttctaggaagcagatcattagtggtaggtaaaaaggaaatttaaatgaaaagactcagctagaaagcagcttatgtcaccatcagcgattggacagaaaagtcttcaaactatagaatacaaagacataaagagatttctctggcagagaagatactgtcttcaagtgccaacccagggcttctgaatcacagatgatgtgactgtctaaacttccaacgagggaggtgacatttttctccactactgtccaagcttatttacagtagactactaagagaggcctgtgcatattaagggatcttttgcacctaagaagtacccatgtcccctctcaggccaactcccctgcaaagaaagtttctcatttcagtttccctctcccaggccagcagttttggctcaggccaccacctgagccgtcaagaggaagccagaccagtgattggcacagctgttactgcagcctgaactgaagagttccctagggattcctttgtctagcatcactagcttagaaaaaccatgagtaaattatgtaatgttgtcttgttaaaagaatgggatcagtggccggagataaataaggaataaaagtaataactgatttgttccttctaaactcatatcagtaaccaagattgtattcctaaacaacttttgctgctaataaaactaggcttgttttcctaacctcctatgcattttctaacatactcaccatgctcaaactttctcttgctttggctctgctaagttatgagctcagctgtgctgagtgagtcctggtcagtcctagatgaattacttccttttaaaggcatttttcataaatacttagtagttaaaagtttaattttaaattaagataaaaccagtgagtcaacagaagtgtgggggagccaagagcatcttttgtcatctgtatcaccttaactgcattctacactcagcttgctctgtcccaaccaggcctttccaggtgtccataacctccaggcatttgaaccactcagaaatctgtacagagagccactgctcctgtgtctagtctgcagtagccacagccatagtgtatcccagttctggcaacagtggtagaggtgttacatcctcctatagtgcctgtattttttctagcagcatatatattgtcctgaaataatcccaagaaaaggtgagcattttttttttcttgagaattatagtgacggccaggtaaaccttaagatgcagatttagtgtcagaaatattagctttcgcctttccccagattctcttgcatttacattcaatttgttgtgcttttaaccatgccctagagctggctgacttctcttccaggccacagattagcaggaaggacttattaagcatttacacaaaggatgatggtgagttaatgtccccagtagggtagcaaaattaacaaatgaattaattaacccttgtttgcattctattttgaatccagattgtaagtaaagcttttgtaataggtattagccaagcttagctgacaaactcaaagtccagcaccaaagaaagcctaatgctttgtgggttccaatcagggaagctcttccttaattaactctggcttaaaggacagataaaagcatcattacaggacatgccaattgtctttccaagagttgaggtgtgtgttaaataacctgaagaactacgttgtatttgactactaactggagaaaggccagaattcaaatcacagcaccagaatcaagtccaaagcttaggaccacaaaagccaccagttagtattttgtattatatccattaacttagagacagacttaataatcatgggaaaacaaataatgcctaactcaaagcacaattatttatggattttaaaaagctaatttatgtacattcacacaccaccagcagcaccatcaccactaccaccccataaacaaaaggccaagtagatgctgcctactttaaatttcaaaaggaagggttgggggatgggtgggatcacaatgagcaactgcgactgtgttgtggtcaaatataatgatatataatgatgctctctgcatttgtacttgtgcacattatgtcctctctgcaaggcctttgcttcactaaccaagacgtccacatcccttgttctcttcctcctggtcctgctgataaaatcgaggggtgtttggactgtcagattagcctagagtcaagtcccctgatggcagtgcctaggccactgcttgccttaccccattcatcagagcccactcatagtcagtttcttattaacattatttgtcatcttctcgttattttagtctttcacttcccccaaagagtggtcctactcagtgttcttattcattacattgtatttcattcatttcaccttaagacctctaataacaaattctgtgtattttactgagcaacaaggacgtacatagatgcctaaaataggtacatatacagatatacaggcctattcatacacgatactggccaatttcctgtttaagggaattgtaggatttggggggggggggcgttgtttgtttgtttcacttgtatgtccaatgacaggagaaaacagcaagccagactccagtagctacctcacttagctaaaagatttaaataatcttcctgctttattggaaaagctagtgatcgctcatgactatctagggtaccttacccagcagccatcccctaaatggcacacgtatgctcatagtggatacttctctctgctgctcatcctgttcgatatggtctctcgagggtggaaatcaaccacaggctctacacttctccgaaggcccatcctttgcttgtcagaaacccagcaaactgaagcctgagttttaatccaaatgaattgtccaaggctaatgcctgagccaaaaataaagatgcagaaggaagagaacttaacaagaatgagcagacgcattgcagtgacctctacgagggcagtgtcctttagcagtttcctgcgacctccctatgtgcagtctgagtctggaagggggcaaacgaatccatcaagcctgtgtctaattggtctcacatcatcagcattccagaacaggaaacaatctgtagccaggaattcttgcttctttgccataagatttgagaagtaaacctttacccttggatggatgtagctcggctagtttgtagcgggttctggttcttggattcaatagccataataaaactatctatactaacttatgtaacctaccttaactaacacaaataaaccacactcaaaggactgtaacgcccctttactgggctgagcctttctggagaggaagcagctagtgctccttggcactcattccccacagagcatgggaaaggagagtgcaggtacccagctcgattccactgcccacacctccctcgagtccacatgttagaagacactggtgataccggctagcccaaggagtgaagagaataaggtcaaaagacaaagtaccttgccactgtcctgtggcatgtttatgccaagctgagctgagaaaccatctccttactctgatgttctcacttctgcagcagcatcctcatggtcgctctctcaacatcctcgagaacactctactgatgtgctttcccagtgggaattgcttttcctagttcataaaaggagtttagtgtataaagtacatgcaaaaacaaattgccttttatttgcctcgtggtctgggtagagtatgaaagaatagaaaggccacagagaaattgcccagcaaatctgatccaaaaagctactaagtgcaactgagagctagccagccaggatagctctgggatgagttgaaaaggcactgagctggtaaaaagttgagttaccaaatgatgcacagtggtctatcatgggtgtttatattaagcttgatttgattttatttatggaaatagaatctcagccttaccaccttcctgcctcaacctccctgagtgctaagactgtactacatctgacctttgatctttctcttttccagtgctgagaatccaacctagggtcttgttggacatgcagtctacatgacttacatccaaacctccttacatcttaaatgatgttctaaataatgtcggaaacaacaggatagtactagtttgttcaaggttttattgttgttgttgggtttttcgagacagggtttctctgtgtagccctggctgtcctggaactcactctgtagaccaggctggcctcaaactcagaaatctgcctgcctctgcctcccaagtgctgggataaaagtttaaaggcagtgcgccaccactgcccggcttgttcaggtattttttataacatgctttactgaaaataagttgttttgagaatgacacgggtaagagcactgagctggaccttgttggttggcgaaaatgtaagccagcaggtgggaagggtaccagccagttaactcactgggcactcctgtgatttcctttcaaggtatttaggtcagtgattctcagcagataatattttgaccccacagatattgtcagtatctgtagccattgctgattgtcacagctcagattgggggaaggttgctctggctactgggtagaggctaagcaccctatagtgacaggacagccccttgcactgaagaaaatcccacctaaaatgtcagtggtgctgaggttgagactcatagcttatgaagcagtgtacatataagaaagaaatggggaaatccatggtgtgcctttagtcagtagcaaacactctgcctgaagttgcatcctataaagaaactttggctttggtggcttgctgcttggcgaggggactcagacatatagaaactggccttcatttgatatgctgcctgttgcaggttttagtcagaggtgattacgatgacagatttgccttgtataaagacagacttctgaaaacttgggaagggtgaatcttcctgtctttttcttttaggtggagcggtgagtatctgtaaaggtgcacatgtgtacttggtacatgggaaggtcagaggtcaatctcgggatcattcctcagagtcatccactttggtttttaaggcgtggtctctcaccagtttgtctagactagctggccagtgagctgcagggatcctctagtctctgtctcccctgggctggggtgacaggcttatattgccatatggggctaggaatgaaactctggtccgtcctcagcacaaagggaggggctgcaagcactttagttcatgtaagatggtcaaggaacagttaagccctaggagccaaccatctttccaagtaaggcccctctgtaatagagccctgttcccaaggaagagcagagccctgttcccaaggaagagcagagccctgttcccaaggaagagcagagccctgttcccaaggaagagcagagccctgttcccaaggaagagcagagccctgttcccaaggaagagcagagccctgttcccaaggaagagcagagccctgttcccaagggagagcagagccctgttcccaaggaagagcagagccctgttcccaaggaagagcagagccctgttcccaaggaagagcagagccctgttcccaaggaagagcagagccctgttcccaaggaagagcagagccctgttcccaaggaagagcagagccctgttcccaaggaagagcagagccctgttcccaaggaagagcagagccctgttcccaaggaagaacagagccctgttcccaagggagagcagagccctgttcccaagggagagcagagccctgttcccaaggaagaacagagccctgttcccaagggagagcagagccctgttcccaaggaagaacagagccctgttcccaagggagagcagagccctgttcccaagggagagcagagccctgttcccaaggaagagcagagccctgttcccaaggaagagcagagccctgttcccaaggaagaacagagccctgttcccaagggagagcagagccctgttcccaagggagagcagagccctgttcccaaggaagagcagagccctgttcccaaggaagagcagagccctgttcccaaggaagagcagagccctgttcccaagggagagcagagccctgttcccaagggagagcagagccctgttcccaaggaagagcagagccctgttcccaaggaagagcagagccctgttcccaaggaagagcagagccctgttgctctgcagatactgtgctttctctgaacctcacacttctgctacagacttttattaatgccatataaaagcagatttgtctttttcttcccttttctgccgttttttcaaggtttttcttgtttgtttatttgagatagggtcccactgtgactctagctagcctagaattccctatataaaccaggctggcttcaaactcacagagatccacctgcctctgccttccaagtgctaggattaaaggcatatgccaccatgcctggcctgccttattctctagaatgaaaatcagggagcgtggtgaaagggagctgaggagtgattgtgttttagaatgttattgatccatgcatctgtaccaccgctgaaaaatgactccagggctacaaattgttagaaaatgagactttgttctgttttgcgctccttaatttctttatctcacacttgtttcagttactgacctttggctagaccaagcaggtgcactggccctccatcactctataggtggtttttgcaccagaaatgcctgataagactcaatcttttccttcactgcaggcctggtatcagcagagataagggagtggcactggggaactgggtgtttcctccttatcagttgttgccctcggaccacagccctaggtgtataaatccatgaccagccctgaggaaattcacttgataaagctaccattagtgtcatttaacgatagcttacaaaggtgtgacccagtggggacaaagccactacccaaagtggatagttaacccagacagaggcactgggagacctggctctgaccttcatcctgactggcaggagtggatgtttagggaaagggagggcatcgaggtggcccagctgtgtccaggaaggagcattaaagtcacctgtaagggatgtatcgcttctgcttgcatggtccttccatctgtatttgctcattgtagtctcacagcaaacatgaggaggaagttgtggtcagcagcactagaaaaaaggcaactgactcatccaggaagcaacagtccacccagggcatcccagctatagagagagacattagtgacttgacactgcttgtggagtatgtatttgctcagatggccatcagtggagcctaggctcgtgccagtagccctgagtcccagtgacagctctgtctccagctctctgtgtgcctaggaaatgatcactagccctttgggaaacttagtgttctgctcagaaaaagagaggcctgttggggctatctggaccacacactgacatcagtgaagtcaggctgtagaggcctcccagaaatgcctgaggggcacagcttgtcctgggccagaaactgctagacactttacccatgatctcattcaaggcttgcagcatcccagtgagatggcttctcatgttatctcccctaagcgtatgaagaaactgacgctcaccaggtgaggtcacttgctccagggcatcatctagtctgcatgggtagcataccagataccacaggctgggtggcttaaagatgtgtttctcacagctctcggggggatggaaggctcagaggagagtgctagcaggatttgcttctgatgaggattttcttttctttctttctttttttgtttgtttttttgttttttgttttaaagatgtatttattataaacggtagctgtcttcagatgcaacagaagagggcatcagatctcattatggaaggttgtgagccaccatgtggttgctgggatttgaactagaggccttcggaagaacagtcagtgctcttaactgctgagccatctcttgcgccctgatgagggttttcttactaggtcactaatggctttgaatagtgcacaaggaggaagagagacgctaagacattgagaagctctgtttcctgcgttaaggacactaagccaattggaccaaagacatacccttaccttaattagtactacctacatactctgtcaccaataggagttaccttggggggaactgatcttctttatgggaaccccagggggacacatcaaggataggagaacaatttgtggttcctcatctattgtcttgagaaccactgtcctcagttgagctaggagcaggtactgctgggggcaggaagcctctgtaggccatctctttattagacattcccaacaactccaagtcactgccctctccacaggtatgggtgggtcagtgggaaaaccctccttaggccaagccattgagtcctgcttggtggtgctgtaagtaagatattggcacattagggtatagtatcctgaggtaacccgtatccaagattgaaaagtccaggacatcctgaagacagatgcatgtaacacctccagggctaaagaagatcaggtagtcggccccctgggctcctgggatgaggtgaaagttcccttccacagctcctgtgtggcggaagagagcagggctggggcagccgggctcattagtcattgctaaggactcctcagggaaaacaagctgcacaggcaggcagactccagcaggccagacaagcagctagtcagccacctggaatggctcccctccatgacttaccagagctgccctgttggtgagaaaatggttcctttccactgtttgactcgtccttgttcacacttaggtcataccgtaggtaggcctttaaaggtgggaggattttcctcattttaaaaagtgcacagcataacaagccccaggacatcatgcagagaatgaagatgtccatcagaccttcctgaactaagacataaaagcagtaagttaggagggctgaagtagagcactccctggcatacagcgcagggctgccaaggcctgctaagggttccggctgccaaggcactaggttacattcttggctgctcaccctagagtttttactccattctctgtggtggagaggaaactggcacacaaagcctcatgtgcctgttgtcactgttaacagagtcactgggtcagtgttgactcccctcccccaagccagtgtctcatgaggccagttccaatcacagggagattgtgtcactggtgaaatctaacatggagccttttgaaaacagatgcagcccctgtctctcgttataactcctcccaaggacagggatgtcccgcacagcctgttgtgctctgtagtcttgtaatcacttctgtgcttggcttttgcagatgtgaaagctgtggagctgtcttccattctgagtgcaaagaaaagtctgtcccctgcccacggtgtgtccgacgggaactgcagaagaagcagaagtccttctggcggcagctgaacgtggacgagagcctggaggaggcatgcgccatgttcgagctgtcctaccaaagcacctgactgtaggccaggatgcactctccaccgcccaaggggctgcccgtgcccatgcagatgaggctgttccttcttcagctagatgtagatagataagttatttatttatattatatacacctatacgtcctgtacgtatgatgctttgtataactcattgtccaagaagttcacaaagatcttgtggatgaactcctacagatagctgagttacccttggccatgacatttgctgcttgctcccagcaaatgtgattgacacacattgctctgtagttcagaccccttcatacacactggctctcagggccagttgactgcacaagtattggaggaaacacctctcacagcaaagctttgcattgctactgacatttagcctttgctggggaaactgaggtagagccattgtcatctgcttcacaaggacatccctaaaacacaagaatgtttctggatacttccaggcccagagtctttggcagagatgggaagagtgaagcagagccacatagcagaaagcgagaggccccttccttcaacagagagcatcaggaactgagctgcgttgggtgtgaactcagtccctgagagagagtacagaaagcgaggacctcagtggccagtcacttcatgtcgttgtctgttggctggtacgaagcccagcaccttcctgatgatcagagtctacaatgcctgccagagagtgcacatgggtgccc

SEQ ID NO: 1131 - DNA, 3206 bp, Mus musculus
tgtaaacagagccgggccgggatggtcggcagctggagcgcagtcgctggcggtgaggagggcgggctgcccgggtcggggtcctgccgggggtcggctgcaggccgcaggggagaagggaccagagccgcggaaactgaggattggccatacattgctttggcaaacaccgcccgccctgctgtcttccctgagatctctaagaacaaggcccgtgctcctgtgcttagccttctctaggcagccagatgaagattgcttcctcttgttttcacagttgtattgctgaaccacctctctctgttggctgagtgttcatgacacctcttcctgaagcaggttagaagcttggaccctgtgtcatggaagctttggaagtagatgacatcagccccgccttagaggttactgaggatttctttagtacttttgacagtaagctggaaaaggctgtccaacaagcagaggtttacgggatccaagaagtccctgaactggtggggcatgaggtacttggtaacatagcagataatggtgctttaagaagcgttgcttccctgggcaaggggacaatgatttgggaccactgtaagagcaggcttttagaaaccaaagctcaaaatgtcttccctgccaaagaacagcttatggtccagagagggacagccccagataatctttcctggatggcacaaaaggaagcgtcaaccttcaattttttcaacatctgtcagcgtcggagggacagacctcgttctgtgaatgacttattggatgagaccacaactttcaagccaggccatgctcggtcaagaacacaagcagacattcccaaacatcctgaagaagggttatctggagatcaggaagaaccatgacagttactggcagagctgttatgcagaactctcaccctacaacttaaacttctacagccttgatagcagtggcaatcaaaacctgtatgccacataccagctttcccacttccagagcatctctgttttaggcaatcttgaagctaggatggtagacactgttctctatgacaattctcaactgcagctaaaggcagagtctccatgggaggcattggactgggggcagaagctctgggaagtcgtgcatgctgctgtacccaattacatgggacggcagggtgagatggcaaactctccaggactcatccatcatggtgactgtgcacagaaccactgtttacagaagaaatccagtgggctgctggcctcccctgtcttggatagccccaaacagtaccaaaatatcctcaaatcagggacactctacagactgactgtccaaaacaactggaaggcctttacatttgtgctgagcaaggcctatcttatggctttccaccccggcaagctagacgaagatcccctgttgagctacaatgtggatgtgtgtctggctgtgcagatagacaacctggatggttgtgactcttgctttcaagtcatttttccccaggatgtcctccgcctccgggctgagacccgacagagggctcaggaatggatggaggctctgaagacagcagccaacgctgcaaggagttctgagcaaaacctgcaagtcacactgcggaacaagcccaaggatcagctagatggccgcgagctgcggaagaacaaacgccagtctgtgaccaccagcttcctgagcatcctgaccacgctgtctttggagcgaggactcactgctcagagtttcaaatgtgcagggtgccagcgatctattggtctctctaacggaaaggccaaggtgtgcaattatagcgggtggtactactgcagcagctgccatgtggacgacagctttctcatcccagcacgcatagttcacaactgggacacctcaaaatacaaggtatccaagcaggccaaggagtttctggagtatgtgtacgaagaacctctgatcgacatccagcaggagaaccccatgctgtacctccatgctgagccactggccaccgttgtacggcttcgacagcggttgaagtcactccgggcctatttgttcagctgccgggcagcagtggcggaggatctgcgccgcagaattttccccagagaatatctccttcaacagatccacctgtactctctcgctgacctgcagcaggtgatagagggaaagctggctccattcttgggaaaggtcattaaattcgccaccgcgcatgtctacagctgcagtctctgtagccagaaagggttcatctgtgagatctgtaacaacggcgagatcctctaccccttcgaggacatttcaacaagcagatgtgaaagctgtggagctgtcttccattctgagtgcaaagaaaagtctgtcccctgcccacggtgtgtccgacgggaactgcagaagaagcagaagtccttctggcggcagctgaacgtggacgagagcctggaggaggcatgcgccatgttcgagctgtcctaccaaagcacctgactgtaggccaggatgcactctccaccgcccaaggggctgcccgtgcccatgcagatgaggctgttccttcttcagctagatgtagatagataagttatttatttatattatatacacctatacgtcctgtacgtatgatgctttgtataactcattgtccaagaagttcacaaagatcttgtggatgaactcctacagatagctgagttacccttggccatgacatttgctgcttgctcccagcaaatgtgattgacacacattgctctgtagttcagaccccttcatacacactggctctcagggccagttgactgcacaagtattggaggaaacacctctcacagcaaagctttgcattgctactgacatttagcctttgctggggaaactgaggtagagccattgtcatctgcttcacaaggacatccctaaaacacaagaatgtttctggatacttccaggcccagagtctttggcagagatgggaagagtgaagcagagccacatagcagaaagcgagaggccccttccttcaacagagagcatcaggaactgagctgcgttgggtgtgaactcagtccctgagagagagtacagaaagcgaggacctcagtggccagtcacttcatgtcgttgtctgttggctggtacgaagcccagcaccttcctgatgatcagagtctacaatgcctgccagagagtgcacatgggtgccc

SEQ ID NO: 1132 - protein, 482 aa, Mus musculus
MVDTVLYDNSQLQLKAESPWEALDWGQKLWEVVHAAVPNYMGRQGEMANSPGLIHHGDCAQNHCLQKKSSGLLDVLDSPKQYQNILKSGTLYRLTVQNNWKAFTFVLSKAYLMAFHPGKLDEDPLLSYNVDVCLAVQIDNLDGCDSCFQVIFPQDVLRLRAETRQRAQEWMEALKTAANAARSSEQNLQVTLRNKPKDQLDGRELRKNKRQSVTTSFLSILTTLSLERGLTAQSFKCAGCQRSIGLSNGKAKVCNYSGWYYCSSCHVDDSFLIPARIVHNWDTSKYKVSKQAKEFLEYVYEEPLIDIQQENPMLYLHAEPLATVVRLRQRLKSLRAYLFSCRAAVAEDLRRRIFPREYLLQQIHKLADLQQVIEGKLAPFLGKVIKFATAHVYSCSLCSQKGFICEICNNGEILYPFEDISTSRCESCGAVFHSECKEKSVPCPRCVRRELQKKQKSFWRQLNVDESLEEACAMFELSYQST

SEQ ID NO: 1133 - DNA, 108000 bp, Homo sapiens
gagataagctcatttatacaggctatcaatttttattgctaatgactctcaatcaccctactcatcctttaatgtagatggcttctactcaattaactaggagacatttttggtacttcactgctattttagtattacttcagtttctatcattgcatggtattctattgatgcattcaacattctaattataaaaattagcttataagtgtaacccgaggcaaggatatagtttaatatgtctgttaagcaaatgcagtgttcctgaaattcatctttttcaaatcttttccactctaattcatgacttgtaattccttgtcttctctcgtaggctctcaccagtcttacatctagccaagggtagtgaccatgggagtaaaaagaaaaggacattccatgtattttttcttcttttaaaatctgtttttttagggacaaggtcttgttgtctcccaggctggaatatgatgatgtaattgtagctcattgcagcctcaaactcttggctcatgggatcctcccacatcagcctctcaagtagctgggactacaggcaggcccggctaattttttcagttttttttagagatggggtcttgctatgttgctatggctggtcttgagttcctgtgctcaagcaatccttccatttcagccacccaagtagctgggattacaggcatgagccaccatgcctggctaagaaaaggatattttaaagcacaggacttgatgactgattagatattaagggacatggctgggcatggtggctcatgctgtaatcccagcactttgggaggctgaggcaggcggatcatttgaggtcagagaccagtctggacaacatggcaaaaccctgtctctactaaaaacacaaaaattagctgggcttggtggcacgtgcctgtagtcccggctacttgggaggctgaggcatgaaaatcgattgaacctgggaggcggagattgcagtgagactgtgccactgcattccagcctgggtgacagagggagactctgtctcaaaaaaaaaaaagatattaaaggacatacaagttgctgtaagcccagtgcctagcagaatcatagctttgctttgagctcatgtacaagcagttgcaccttctgattagtaaataacctcagtagctttttggtttcttggcattcatttaggtttttattacaacctccttaaccattctaaatccctggtgtagcacgagtcaagagggtgtcctatttgcaattttatttttcctatcttgttttgattgtaaatataggaattcagccttcattaggctctgtaaagacctgaactactcctttgagtgctcaacagaccatgataattattttttaattctcatgttttaaaaaagtttgatattaaattatgttgaaatatgagaactgagtggtagtttgaaaagtcagctgtaacaaatggcatttgcaagtatcgctataatatattctgaccaccatttatttatttatttttaaatttttttccaacagggtctcacttagttgcccaggttggagtgcagtggtgtaaatcatagctcactgcagcctcagtctcccacgctcatgcgatccttccacctcacccttccaaatagctgggactacaggcatgtaccaccatgcctggctaattttttattgttattatttttagtagagacgaggtcttgctatgttgcccaggctggtctcaaactcctgggctcaagcaatcctcccacctaggcctctcaaactgttggggttacaggcgtgagccactgctcccagccactgccaccttttagtcatccaggagatagcgaatgtgagtaaatggcatgccaagtttttgacaccttttctttcggcattctctggagagcaggcaagataaatcatattcctattgcccatcagttgaagggcaggggcaagcagtggccacccattctcaggctggagttctagattgcatggctgatcacctattctgaggccggtattctcataagcatttgtggaggggtgtgccaatatccaggtgccaactagtcaaaatcagccaagatctctgagtaaaatttattttaaaacctttgaagttagtaatccaaactgaagaaagactcgttgtttctcctgaggaatatgccaaaagcagagggaggcagtgtagtaccttggctagagctggagatgaggacccaggagatctggggtcaggcaagacctcttccttgagctgcagactcgcatctccaactgcctggtgagcatttttgttgaaatgtaccaaaggcacctcaaattcaaagtgtctcaaatgacccataatcctcccttctcccattcctgctgttctaagttaacaagggttaatgagaggctgggggctcctcagaagaaataaaatttcctcagtggatttctttcgatgaggtcaacaggttttgtgtctggtcctgtcattctcttacttgctggtgttattactgcatggttatgttttctccagttaatgttcatttttttacctggctctttttctgaactcaccttgaatagcttaaagccttattggaagtgcttcttccctcgtctgctccttcctcctaccctcctccatctctttccttcctcctgtagtaagtccaagggtcttcttcatcaggtagggcctctgcgtcttctgtctcaattggtgatgaataaccaggctcttgagcctttctgaggataagtgctgctttgggtgcataaagcaaaattgggctccggtataatgagggctgtgggtagctagggtgtagcagctattttgctaatagggaagcctggtctgaaggaggccttctggtcaaacaaagtagcatatttgttagaaacactgactctaaacctagactgccagggtttccaactttgctctagtacttactagttgtgtaatataaggcaggtttcttaatcactctgtacccgcattgtaattttttttttttttggacataaagtatgaggtaatggtagtactgacctcaatttcttgtgagcattaaatgggttaaaacatctaaagtgcttcttagaaccatgttcagtacacttgaacacttaataaaagttttaaacatttaatgatataattgttattattatgaattgaatttgaaacccatcagtgagaatcaaagtgacactaacaagcatttcaagtttttttttgttataaaatgggcctcataataaatatttcttgaaatgaattggccttcctgtggtacactttctcatagttattaactggtttgttaatgggaaatagaccattctttccctctctcatactgatttgtgatcagctatttaattgtcattcacaccagagtttatagtcactgatggaagcgattgtttcttacctatttgtttttcttttctttttaagttacttttcacctgagaattttacccattgttttatcttcagtatctaacttagtgctttgaacatgtgctcaaaaatatgtgctcaaacatttttaaaatgtaaaatgaatgaattctggcaagaactaagctgataaattaaagatattaacttctttagctggtttgtgtctttctagaaaaaatgactccaccctcttttctgacatcctccctttctccaccttcacatcaccatttggcatttgcacatcctctctgtgaagctctgtagcagcagtaaatactgaaaaatgaacataggcttttgtctcaaaagctgccctgataagagaaaatcaaacacttttgattttctctccctgactgtgttcactttcccctccctgactgtgtgtggcttataaagtgcccctaacgttggaagaatgttactctggtcttggagagctatttagataccatttcagactcctgagttgcataggcacaattaagatttcccttcttacaggaatctgactgtttgatgagcacaaagcctggtgagatcactgtggtttgccctttagtctgtccgaagttggcaatcatttgagataattttataacgttttcaacttttctctgttccttgattgtgtttctttatagaagattattgctttggatttggaggccactgctttcctagaatggggaagggatatatgagagaagaatacatgaaccagattaacagtttgtttattactatcaaagccaacatctgagcacctagtgtgtttattctcagggtgagtgagagagcccaggtggaaagagagggaaaaataataataataatggcagtggcagctaacactttgtgcactgataattttaactgctttataggtagcagcttatcctgtgacatgggtttttcattggtcccgttttaaggatgatgaaactgaggcacagggagcataagtaacttgttcaaattcccacagtgagggaggagtggagcctcaatttgaatctaggcagtcttcctccgagtccaggctcttaaccactaagctggggctgtgcccttactttggaagctagtggtcctcagtctcctcagccctccactttgaaagcctcattggcagtaaatctctatgggggtagttggtggggatcagtacgataatgttcactgaactaaaattaaccaatataggtatagttgaaattatttaacacagaaagatttatgtgtgccttgtaactctatcatgggttcagaaaaactgaggcatgccaaagcaatccagctaagcaaggattgtttcctgcatttaacttattcactgaaatactcggacacagagccggtcacagtttcttaggagaccaatgaatctgcaaaaggaagatggtcactttgcctttcatactctttaatgttagcatgccaacagctgaagtgaaccgaccctgatgggtttgtaagcatggaagggagagctttggggttttgccccattaaaaaaaattattatgctttaagttctgtgatacacgcgcagaacgtgccagtttgttacataggtatacacgtgtttggcccattttttaactgtcttacttgggagattgccttgccttatggagagacagacctagctctgtcttcttaagaaggaatgtcggctgtgctagtggatgaaggttgccaccagttgatgggatgtggcttttttcctatctaaatagttaacaccatttccatcatctgaggattgaatagttttgtctcagggttaaatcatgaagtgatgatgggaagaaatagatctaaggcaaagtgacagcagaggcagttatctctgaagaacctcaaggtagatggtggacaccaaagctttctcaggatcagtgcctctccttactgccatcccagcatctgctatgcacttggtagctatagcagggtgtgactgggaactagccctgagagtgggccctgatcctactaccagaatggctgatttcttacaagtcaactccagaaaatgaaaaaaaaaaaagaatggctgatttctagtcttagcactgctcttagttgtataaagacatgctcttcactactgtctgtactaaacccttttccctctgcatcactgtcatctgttcttgttcattgagtaatgacacaatcataagcaccaaggactttgccgtaggataaagaagacaaggtcttaacatctcagaattacaatctaaacataaatgtgtcataaggtaagaacataaaaagtcatgtgaacatatatatgaaatacaggttatacacacgcacacttataacaaagtatagatacataggctatatggaaagaatcctcaactaggacccgaaaggttatccaaactctactcctgattgaccatgtaagtttggaaaaaccactttattgtctattgcgtttggtttacgaacctactgaggcaggttaaattatctctattgtccttcccaactccaaaattatatcattctaggatgtatttgaattgaccctgactcatggttgtgtggaagctaattactgtagtcagataataaaaaattgtaatgaaaacgtaggtatggttgaaattatttaacacagaaagatttgtgtgtcttgtaactctacttctgggtgaaccactgttgcaatttttaaaataaaaaatttttaaagaaatcctttgcattagctacagagctctgaaactcaacaaactgccagaatctaacttacttttccattcctgactgtgttcacattttcatctgcttggcaagggcagtggtcaactgggcttttgtttccgtcggtttcactctctggtgacctggtaccattcctatgcctgtattttcttgttctaagtacttcaggagaagatctcaagcagagattttctttagggctagaaaaaccatggcagtatagtttctttatctcaggttttgtgttactctgtttcggttccctttttcccatctttcactttaaaaaaaaaaaaaaagccaaatttgggacttatactaaaatgactgctttttcaattatgatgtttctcaaaagccttggagccagtagaggtgggaatattcctgcaggctaagaacaagtgaggtcaccaggacatggtctcttgctgaatttatgattcacccttcagcaagattagtcagtacaaagaagttgctaaaataggtcacagaaaattgattttatatggtcgtatagtttccattggttacattattgaatgttggcctgtggcagctatttggaaacccaatatgcctcattgacagcccacattctgattcataacacttctctatgggaacctttaaatcaaaatgtctgatattttttcctggttgtcctattaatttttttttctttttggctaaggaaaactatggttactaattttataaactgctaaagttttctttctaaaacacaaatcttttcatgtcactttgttctcaaaagtgaaccatagttccccatttcttacaaaatcaagtgtaaactttataaagcatccaggtatcttcccaaccttatcacccataccttcttgcttttgaacctttttgccatttttgaaagtgccatgtgctttcaagctcctgggcctttgctgtctcttcatcccagaatactttccctgcccttttcactttccaaaaatcctccattatttttcaagggccaattcaaatcccacatcctccctgggacctttccagatttttctcaattaaaattcttttttttttcttccctttcactttatgttcccatggcacattttactctgctgtgcacgatagataattgcttgtccatccatctcccacaccagattggaagtcctttgaagataccaactgtattgtagaaaactgtactgtaccaagcatgaacacatggaaggttgaattctgtgtattggtgcttaaaaatcaggacagaatagtgatgttttgttttttattcagaatggaaggggctactctttcctttctccttagttacagcttgattcaagttgaatgaagtttgttattattaatactgtcagtaagagctatcacttaatgagcgataattttatgcccagctctgtgctaagaagtgttcattatcttagttaatactcacaacagtttaacataatagatgatattatcctgattctacaaatgaggaaactgaggcttagagaagatgacctcatccaagcctatgcagctagtatgtggcagggctaggattctaagccaagtctaactccaagactgcacataaccactgtgttaaaccgcttctccagcctgaggaaggctaggactcattccctccaccacaaataaaacacagtgtgatctagatttaaagtctggaggttggagttccactctcaacttgcccactttgtggtataaccttggccaagtcattttgcttcctggaacctctttccaaatgtgttcagtcagtcagaatgctttcagaagcaagtaacaaaatactcaaccaaaagtggcacaaatagtaaggccaaaatatcactgtaatttttcttttatctgacagataactattgagcacttagtgaatgtcgaggacttatgcaataaacacttcacaggatacccaggggtaggtggtcttggggtcatccaggacctacaggctttccatctttttgctttgttttccttggtatattggtgatttctcttctctcccatcattggtacaaagtggctacagctgccccaaggatcattttaaaaaacattttcctaacttcccaaatgtgttaggatcattttcttaaataccaacagtaaaaaccaggaagagagagagcagggcatctcttctgggtctttttttccagaggctcccaatagcacccgctccttggccagaactgggtcacatgtccacccctaaggcaatctctggcaaaggaaaataggattactgtgattggattaaacaaattattattctttttacagggcaggggagaggccatctttcctgagcatattgcccccatacctgaacaaaattagggttctgttaatgaaggcagctgataggttttgccttacatgtggatgtgctagtgggatttctaggatctcttccagctctaagtctctataattctgtaggctgcatcaagaaattgtaatggaatgccatttatgcctaaaatccagcagcctaagtatgggagggtcttttatatttaattcctatagattagatatatagagccaaaagctcaccatggcaaagaataagcatggtttgaaaggtgatgtttggaattgtttcctgggtccaaaacctcaacagaggctaaggcttgccctcatcacagaagacagaaaatctctgcttttaaaaagttggatctgtgatctcctagtcaggttcacacttgagaaaaattggccaggaatgtattgacttatgctctatcactgttgcccatagcaaagaactggatggaagagatccctaaactggtatatctagttaatgttaatatgtagccagatatgttacaggtctgtttccactagagctgacataggtaatctttttcctaggtttatgaagggaaaatgaatggaatatcctctttttacccaaaaagaaagtctccaaagtagccatagaaaagactagttcatttctaccagaacaaatttgttaataaaaatatctgtggaataccatctgtgtactccactggccaacactgtacgagggcctgtggagcatattaaatatgtgcaagacacagtccagctttgattcctgtagtatcactctcttcatgttctttgctatggacatgtgtggcagtgtcatgattagtgtgccccgatgtgcctgtaatgaggagaacaaagacctaaaattagttcattttttccgtttgtttctggcttgaacatagtcgagtactataatatgaaacaaattgacttggaaaactgtattttattaaccaggaatgcaaagaaaagagtgatgattgtgactcagaatgccagaggagtcttcattgaggaaaggctatttcagctgagctttgaggattgagcacaaagtcaaggtggaaagaacacagcgtatgtatgagatggtcaggaggctaacctagaacaggggtacattttggagtagtgagctgagactttggaggaccttcaaagccatatgaatagacttactgtgatatatttggcaagaagcaaccacacatgtcttgagactcaagattaaaagggtatttaataagaaatatggaagttggtggggtgaaagtggtgatagggtagcagggaccctccttttcagtggctttatgtgtccatgtaaagggacgtcagctggaatagcactcttggcctccgtccatccctttgcacaccccacccatgagaaggaggagtgacttattggcaagtttaggagaggaaccaggtaattcagctgctgtcctaagagcactaattctggtccgctcccccagatctgctcctccatgccatcagcccttcatgggcagtttcccaggaggggaggcctctggctatccagtgatgcttgtgactcagaggtaagtctctgaaatcctggggttcaatttgctgctacgcaactaagttgcatcctccaactgtctgatgttttgatccccatgtatctgaccaccctctgtctatctcaattggttcaaaagttgggtgaggaaaaggaaggctcttcagtgggtctcctcaggccccaacagtgcatggaatgattggtaggtggaaagaactaagggatggaaaccaatcagaaggtctgccaggcgtcatgatgtgtgatgaggactcagattagtgttgaggactcagattagtgtgatagtggcaataaagagaaagtgggacttgtgaaaaggaaaagaaaggctgtaattggggatagatggaggataatggatgaaggaaagggaaaatctaagtgaaggcccaccatctggaatgctctttaccccttcctgccgtctctgaatatcaattctatcctgtcttcaaagtctacctcagataccacctccttctcaagacttttaagaacttcccaggcaaaagccctctctttcttctcttgcgtgttagaaggctctgagtactttatgctgcatattgcagatactttggggcccatcttttctccactatgggctataaactctgttgacacgatctgtgtctgattggtttggtatctccacagattgtagcaaagtcctttgctgatacagtcaacaatatttatggagctagcctctggtattcaggaaggagagagatatcaaggttcctgttctcaggaggagagagttctttgaaggaaataaagcaagaggtgtgatggagaacgattgaggggctctttaacctgagtgtttaagggatggcttcactgaggacagcacttttgaggtgaaaaattgagagaggcaaataaggtattggagctggggagagaagccccagacagagaacatggcaactcagaggcctcggagctagaatgtgcttggcttgttcaaggaacataagagaggattgtggctggagcgagacaagggttataagatgatatgagatgaggccagagcaatagccagaggccaggtcatgtggaccaggaagaagaggcgttgtaagcacatggaatctgaaggaagaagacgggttcagccataagggggtaggtcaagcaaataattttttaatagacacagtaaaccttgggatattggaagatggagaaaaggaggttagtagagagagaattgcaacatattatagaggaatggattctagagaagtaggaaggaatttgttaacagagtagaggtggaagggtctgctatagcaaggaagcaaaatgtttcttcttttgatactaaaaggctgaaacagaaaacatctgttgaacacttacatagtgtcaggcattgtcctaagagctacttatttcttcctcacaacagtacagtgaggtacatactactatgatagccccactttaaagatgaggaaactgagactcaggttaaataatttgtcagcggtcacgtaggcagtaagggcagaattgggagttgaacctaggctggttgctccagcaactgtggccttaaccactgggctctgtggcacttctacaggacatgggttagtatgatgttgaagtgaagccaagcatcttatatatacaagagctccctacagtgcacagagaaagagaccgtggaattaggtgtttgaggaaagtgaagatggtatggaaatactgttctggggattgtgtttcagacccactgaagtgaataaaagaatagattatcaggattaaagatatgatagaaggtgagcaatatgaatttgtatttgctggggttagcatttctatctcttgctcaagaaagctagatttaaatagagaatatagatgatggtgtgatccagaattggtgattaaatcggagaagtaagagaaaatgagttttagctactgaccacaggatcttgagaagctaggagtccagtgaaacagggaagaggttgtaaggggtaaggtggaagagttttgtgattgaaggccctcatgaagatggagtggaaggcaggtgaggtggactgagaaaaatgcctgtgtaaagaatgaaggaggaccaggttggaattgataagaactttattatggagagttctaaaaggtctaggatattactgttgtggaagacagaatttgtctctagagtcaaagagggtaaggaactgtgttgtcaggatgctaaaaccagagggcaaatgcataactcatattattacctaccacagcaacaccccagtgttctttcccgctgagtccgcatgtgtctcagcatctttctcagtgcagagttccaggaagtcaatagcagtcaatgaaaattgatttttgtctttgctttagacagtgccacaaggggttgttactcgagaccaagggtgggtggagctgacagtagggcagtgtataacaggtgaagtttagtagtccccctggaattagagtcggtggctagagtggaatcttgaaacctagaggttgtaactaaccttggagaagtgtgcagccttagaggagggagtagggctggtaggtgtttgaatggttctcaggaagtctaaccacattctctcatgctctaggctgtcagtgcagtgctggcagcacctgggccagagccattaggtgaggttgaaccaagtagcatgctgtctggaaagctggaaatggggcctaaaagacaagagaaagtagcagttgaatacagattatttgtattggccataagtgaagacaagccaaatcaaaggaatatctttgttctgaagtgatacttcttttcttttatcttgagctaatcaattatattgatggagggcgagtgtagtggctcacacctgtaattccagcactttggaaggccaaggcaataggattgcttgagcccaggagtttgagaccagtctgggcaacatagcgaggccctgtctctacaaaaaaaaaaaaaaaaaaaaaattagctgggcatggttggcacacgcctgtagtcccagctactcaggaagctgaggtggaaggatcccttgagcctgggaggttgatgctgccgtgagccatgatcatgccactgcacttcagcttggtcaacagagcaagaccctgtctgaaaaaaaaaaaacaaaaaaatttgtaatgatggagaagtctatattcaagtaatttaccacaatcaaattgtaaggaccttaagaacttctgtaccttcatgtctgcaacaaagcttagtgccctgctttgcacgtagttggtgctccataaatgtgggtcaaattgctttgcttccttgtctttgagcctatataacagttgtaaaccctgtttcctgacttccagataatatcatttatcctttcagcttactatagcctggatagcctgtagagaaactgaaaagaaagatgatccagtgaaagaaatgtcatagatctgctaaactttgacagagaagcagtccgggtgagcctgtctaggacagagtgttatactgcagtcttacgagtactccatccactttctgctctggcttcttttcacattgattaatcttattataataagtgtttcatttaaattttcctagataattttgatatggaatattggcaccacatggcttttgagttctttgaaaacattaaaatgttgcactttgtctttcattccaactattgcctgatcttcagaatcctattcctgtgggttcattcattattctgacccgggcagcccagactgaaaggtaaagtgggttacctaaacatttcatttatggtgatctggaacatggtattttttttttttttttttgagacggagtctcgctctgttgcccaggctggagtgcagtggcccaatctcggctcactgcaagctccacctcccaggttcacgccattctcctgcctcagcttcccgagtagctgggactacaggtgcctgccaccacacccggctaatttttttggtatttttagtagagacggggtttcactgtgttagccaggatggtctcgatctcctgaccttgtgatccgcccacctcagcctcccaaagtggtgggattacaggcatgagccacaccgcacccggccagaacatggtattttttaaaaaggcaaaattttataaagtaaccaaaatgaaagcacattaatagtcaataattaaatatgctaacatatgtgaacatacctaattactttatctgaatatatttattaaaatatctaaagggttcatagcaaacagtatacagtctgggcaggagaattttgtgggtgctagggtgcagaagtggaaatttttttccttttacatttcttactgatttggggaataatttttattataaaatttaataagtatttgatgagcatgaaatagtatttgaaatataaggcaaaaatgactctgagtcgtcataagggtatagacatagagccatgagggttcagaggaggacagttgttttcaactagaagggatgaagaaagccttcaggaatggatgagattttatcctagccctcaagtatgaggagaacttggacaagcagagacgaaggaagatctaggtgggggactgtggagaaaaatgcatgaaggtcaggagtgggtgagccatggacatggtgatttggtcagctgatggaaagatggtggagttaagagtggcagcactgtgtgaggggttcctgaggaaatttatgatggaggggtcaggctaatatactctgaaccccctaattatcttaacatccgtagaagtgggacaaccacctgtgacatattcttacaaaaacaaaacagaaacaaaaccaaaaagccaccaagaaccaaaacacaaaaaacctcactgaaccttgaggtccaagtagcagttgacagaaaacatgggaaacaggaacattgaagtaattctgtgaagatacactcagccaaatccagaatgtgggaaattctacaggataaatgaaccagcttcttcaagaaatacatggcatgaaaaaaaggaggaagagagaactgttatagatttaaaaagacttaaaagacatgtcaacaaaatcaacatatgaactcattcaaacaaactatgtatattaaagaaatgtgcccaggcgcagtggctcatgcctgttaccccagcactttgggaggccgaggtgggtgggtcacctgaggtcaggaatttgagaccagcctgaccaacatggtgaaactctgtctctactaaaaatacaaaaaccagctgggtgtggtggcacacgcctgtaatcccagctactcgggaggctgagacaggagaattgcttgaacctgggaggtggaggttgcagtgagccgagatcactcaagcctgggcaacagagcaagactccgtctcaaaaaaaaaaaagaaatatttgagacaacctgggaaaattagacacagactgggtattagataaggaattattaattttgttgggtgtgaaaaaagtatcgtatatattttaaagatcttatctgttagactagaaatataccctgaagtatttacaggtgaaataaaacaaatgtctgtgatttgctttcaaacataccagcaagaaaaacaaataaaaaacaagagttggagaggggtaagagggatgaaagaagaatggcagaaatttgcgatttttaaaactgaacaatgagtacctggcattcatcttactcttctacatgcttttcaagtgtgtttgaaactttctgtaatgaaatgttgaaggccaagctaaggagtatggactttactgtttggcacccagaaacctgtgaagagtgttagcctgaggagggacgtgagagggactgtgagatacccagagagtttagcctggcaacagtgggtgaagtggccaggaaggaggaggactcaaccttgatgaaggtggccatgaggatggaaacttttttgagaacagatagaggaaatagtggcaaaagaggaactctttggtgtgttggcagtagagaagtgaatcaggtgcatgacagggaaaattcccttcttcctcttcagtaagtagcatttattgtcctgaaaccactgcactggatactgtaaagacgaggaggagaaggaaaaggggatcttcactgaggaggaacagaaccaagtctttgtattagccacagtagaaagcaatggagaaatagttctgttttttttttttctttttcatggggaatttgtcttgtggtttcagtatgaaattcatgggtacagtgatttgttttgctcacctttctctgttttctttggggaaatggtgatactctgtccgtgatcctatctggatcatttgtgatattagataatttactcatttgcaaaataaattatattacagttgactcttgaataacttgggttaggtgtgctaatcccccatgccataaaaaatccatgtttaggccaggcgtggtggctcacgcctgtaatcccagcactttgggaggccgaggcgggcggatcacaaggtcaggagattgagaccatcctggttaacatggcgaaaccccgtctgtactaaaaatacaaaaaattagctgggcgtggtggctggtgcctgtagtcccagctacttgggaggctgaggcaggagaatggcatgaacttgggaggcggagctggcagtaagccgagatcatgccactgcactccagcctgggcgacagagcgagactccgtctcaaaaaaaaaaaaaaaaaatccatgtttaatatttgactcccccaaaactttattaatagcctactgttgaccagaaaccttactgataacatgaacagtcaattaacacatattttgtatgttatatgtattatatactgtattcttacaatagagtaaggcagagaaaagaaaacgttattaagaaaatcaggccgggcgcggtggctcatgcctgtaatcccagcactttgggaggccgaggcaagcagatcacgaggtcaggagttttgacaccagcctggccaacatggtgaaaccctgtctctactaaaaatacaaaaataagccgggcatggtggcaggcacctctaatcccagctactcaggaggctgaggcaggagaattgcctgaacctgggaggcggaggttgcagtgagccaagatcgtgccattacacttcagcctgtgggacaagagcaagacttcgtctcaaaaaaaaaaaaaaaaagaaaatcaatgctggacacagtggctcacacctatgatcccagcactttggcaggccaaggtgagagggttgcttgaagccaggagtttgagaccagcctgggcaacatagcaagactctgtctctataaaaaattaaaaaatgaaccaggtgtggtagtgcatacctgtagtcccagccactctggagactgatcttggaggattgcttgagctcaagagttcaaagctgcagtgagctatgtttgtaccactgctgtccagcctgggtgacagagtgagaccccgtcttgagaaagaaagaaaaggaaggagggagcgagggagggggggagcgagggggggagtgagggagggagggagggaggaacgaaggaaggaaggaaggaaataaataaatcacaaacaggctgacaggtgcaccatggtggccatagccatctccataaaataagtaaataatcagaaggatgagaaaatatatttactattcattaagtggaagtaggttataaaagtcttcattttcttcatcttcatgctcaataggctgaggaggaagagaaggggctggtcttcctatctcaggcgtggcagaggtagaagaaaatccaggtataagtggacctgcactgttcaaacccatgcttttcaagagtcaactgtattcatctgtgatgatattcatttatgaagtcaaacactttcacttcattattatatgatattattcatttatcaaattagtcattgtgagattttattatttatgaaattgaatactttaaaagaatatgtgtggggttaattaaatgagttgatatgatatggcccagagaaacaaaaagtgaactatggtaaattaatgaaaatttagatttaaatacatagcttctgatttgtcagtagcaaaaatattaaaaataaacttcagtctgggtgcagtggctcacacctataatccaagcactttgggaggccaaagtgggaggactgtttgaagccaggagttcaagaccagctggggcaacagagtaagattccttctctacaaagaaataaaaaaataagccaggtatcatgatgtgcgcctgtactcccagctacttaggaggctgaggcaggagaattgtttgaacctctaggagttcaaggctgcagtgagctatgattgtgccactgtactccagccttggtgacagtgcaagaccctgtctcaaataaataaacttcagatccagtagaaagaattgttagagattaaagagagatggtagttctctagccctttatgatcagatatataacttttatatcatacacaatatattaataaggtatgatatagacagatcctccagagaggaatggatactccagaaaatagcttcctgatcacctttgctatttttcttcttgtttttcttttctttttttcttttttttttttttgagatggagtctctctctgttgcccaggctgtagtgcagtggcgtaatctcggctcactgtaacctctgcctcctgggttcaagtgattctcctgccttagcctcccgagtagctgggattacaggcacacaccaccacacccgactaatttttgtatttttagtagagatggggtttctccatgttggacgaggctggtctcaaactcgacctcaggtgatccacccgcctgagcctcccaaagtgctgggattacaggtgtaagccaccgtgcccggccgattcttatttttcaaaaaattacatgacaaacagcagcctgtaagaatacaccatttccccagccttggcaatatggtgaaaccctgtctctattaaaaatatacaaaaattagccaggtgtggtggcatgtacctgtattctcagctggctgggaggctgaggtgagaggattgcttgagcctgggaggtcaaggctgcagtgagtcatgataacgccattgcactccagtctgggtgacagagtaaaaccttgtttcaaaaaataaaaataaataaaaggccatttcctaggattctaggattcacagtttttattttctgtttcaatttaatgtaccacttaaagagggctgaagctgagttgggagaacagagataggaaatgttgcttagtgagtggggaaaaaatgttggtacccagtgcattttttcttcttctgcatctagaaggtgagggaaccttgaagattccctcgccggtcttctcattcagtccacccaagctggcacctgccaccctagctcatatagttagaaagaagtgaggttttagccaggcttgctgctggtttgggcccaattaaagtagaatttttaattcctgggagctgttattaaaagctcacagggagataagaagaggggaggaaaattcctagctaaaagcaggagaggtggtttttattttactcagcagactcagctgagcctttgggtcacagtagggatggggatagagggacacatagttttaagtcttattgtggaaaagattgaactatcatcagtgcttgatggaaatgagatcaggagaggtggcagcagtgtcgctaacagcactgcctcccttattgcattatcagaagagaaagataacctgcaaataggcatccattatctctttctacaaagggattagtgtgggttgcaagaaattaatggcttttgagttaccacagaaatactaatgaatgtcaggaccagagatgtaaagcaggtaaaactggcttttctcagcctcatttctctccttttctcttttggtttgctattttaagatctagacctgtattactctttttttctttagtcaaaagcagaaatctttagccaaaagcagaaatcataccctttggcagtatgatttatcttttttagggaatgtctcaattagtttatgactgtctccaatgtgtgttggcaaagagattgagaaacatttcagaaattaaagtctctaccagggaggagatgattgacatccttcacatggatgtcattttctttctttctttttttttttttttctgagacggcgtttcactcttgttacccaggctggagtgcaatggcatgatctcagctcactgcaacttccgcctcctgggttcaagtgattctcctgcctcagcctcccaagtagctgggattacaggcgcatgccaccacacccagctaatttttgtatttttagtagagatgggtttcgccatgttggccaggctggtctcgaactcctgacctcaggtgatccaccctcctcggcttcccaaagtgctgggattacaggcgtgagccactgcgcctgactggatgtcattttcatgtctgataagaatgtcaggaaatctctcaagtgataatccccttttattaagtactaaactagtatatattgcagctaatcattgattacggatggcatgacttgtaaaacagaggggaagggagaaaagaagataggaggggaattatacctactatgtgctgagcattgtgctaggtaccttatttctaattcaacaagtacttattaagtacctactatgtacaaggcaatgttcaatgttctgtggtctaagaatgaaaagacagatcttacccttgcccttagtggaactgattgtccagcaggaaagacagccttaaaaaaaatttaagacttattttatttgttcagacatgtaaataagctattataatatagcctgaactaagagcccatgatagaagaataatttagtagtgatacctgatactgactcaggcatgcatgcatgtgtgtaggcgaggttggggaatcaggacagactctctgaaagagggtaagtgtgcagttgctgattgaagcctgtggaaggagcattgcaagctcaggggacagcataagcacagtcaggctcagagagaaaacggccatctaagcagagacctaaaaagtgaactagtcgagtcaagcttggatctctgattactagacagaaggcccatgaactggcctggagggctgctgaaggtttctgagaaatgagagtttgtgagcagcacattttatgctcgctcctattcattgacccttcctcgctttaccaacctgagggaagataaaagtattagcagggagttaggtccagtggcggaaggcacgttctctcttgtgtatttggtactgttaggttggtgcaaaagtaattgcggtttttaccgttaaaagtaatggtaaaaaccgcaattacttttgcaccaccctaatagactgttacctagaaaacatggaaccctggcaaagcgtgattggttcctagattcacaaggcataactagtcacagttgttccagtatttctgttttctacacagacctctgcatctcacgttgatgttgcacgctccgttgatgttgcacgttccatgccccatacttattcttgtacatgtgattccaccctagttctagtttttatttttattttacttttaagacagagtcttgctgtgtcactcaggctggagtacagtggcatgattatggctcactgcagctccaacctccaggctgaagtgatcctcctacctcagcctcctgagtagctagggctacaggcatgtgccaccatgcccagctaattttttaattttttatagagacgggctctcactatgttgcctaggttggtcttgaactcctgggctcaagcaatccctcccaccttggcctcccaaaatgctgggattagaagtgtgtgccaccgcacccagcctcctagttacagtttttagactcgagatttccccggctatttcttgccagttaggtaccatcgtgggattctactacttttattttgtttaatttgaaccagaagactgtcagtccctgatctgtgtggtttcttgtgccctgatctgtgtggtttcttgtgcctgccttcttataactaattctaatcaatactttgcctctcttttcctttctagaacacaagcagacattcccaaacattctaaagaagggttacctggagattagaaaggaccatgacagttactggcaaagctgttatgcagaactttcaccttacaacttatacttctacagcctcgacagcagtgggaatcaaaacctttatgccacgtaccagctttcacacttccagagcatatctgttttaggcaacctggaggccaggatggtggatactgttttgtatgacaacactcagctacagctaaaggcagagtcaccatgggaggctttggactggggacagaagctttgggaagtagtgcatgctgctgtgcccggttacatggggcggcagaacgagctgacaatctcaccagggcttggccatcatgatgactatacacagaatcatagtttccagaagaaaaccagtgggctgctgccaccgtcccctgtcctggacagctccaaacagtaccaaaacatcctcaaatcagggactctctacaggctgactgtccaaaacaactggaaggcatttacatttgtgctgagcagggcttaccttatggcttttcagcctggcaagctagacgaggatccactgttgagctacaacgtggacgtgtgtctggctgtccagatggacaacctggatggctgcgactcttgctttcaagtcattttcccccaggatgtccttcgcctccgagctgagacccgacagagggctcaggaatggatggaggctctgaagatagctgccaatgtggcgaggagttcagagcaaaacctgcaagtcacactgaggaacaaacccaaggatcaaatgggtgggcatgaactcaggaagaacaaacgccaatctgtgactaccagcttcctgagcattttgacgactttgtctttggaacgaggactcactgctcagagtttcaaatgtgcaggtatgaagcagattttcagcctatagctcattaaagaacaatcctgaaccccacaattggaattcactttaaaaatccccttaataggctagtcacagctatctcctgtttataaaaagtatctctcctcgagaagcttactgtattaaaacatcctatattaaattactatattaaaacataaggacaaccatctttatcccatgctgttgaagtaaatagaagcagctatgatatatcccgttgaatcaaaatgatttggctaaagcttaaccagactagaatttaggtttcctgagtcggctgtgattccattccctctgctttcttgaataaaggtcactgtgaatatggatgtcacaaattgtctcataagaaacattcaagtccaaagctgactactaaaactccttaggcaaggaaaatggccacagtcagtaactgtcattgatcttgaccttgtcaaatcgtcttaaggtgaaatctagaaaatcagtcttgacagaaaatgtgggggtggctaaaagcggagtaaatgatgattcagcagatgaccactgagtcactatgggcttatgcccatcatggggaagcccaggccttctggaactgctatgtaaggatgagatgcaaagtggagtttgaggtcaacaatcttattttgtaaaagcttgttacttcatctttcctctactccccattctttccacctttcctgaaacagtaaaattaccaaaaaaaaaaaaaaaaaattgtgccaggtgcagtggctcacacctgaaatcccagcacttcgggaggccaaggcaggtggattacttgaggtcaggagttcaagaccagcctggccaacatagtgaaaccccatctctactaaaagtgcaaaaattcgtcaggcttggtggtgggtgcttgtaatcccagctactcaggaggctgaggcaggagaatcacttgaacccaggaggcagaggttgcagtgagccaagattgagactgcaccactgtactccagcctgggcgacagagcgacactccatctcaaaaaaaaaaaaaaaaaaaaaaaaaagcttttaaaacctcactgaacccgatctagatatctgttataaactaaataaaattattttccttccattaaaccccacagtttgtgacattaaatttaccatgagaatggctttaaatggaaatctgatttggaaggttttaattcaagtctattaggtttaacatgttgtttaaaaatcatcaagaagctcaccaccagccaaaaccacatttaaaattttgtccttgctcctgcattgaaaaaagccaaataaaggtggccattgaaaacccacgttttgaacttaggttagttatgatgctagtcttttctatggaaaataaattacccagagtgaggactgagtgaatcatccttgctttgactcaagggcctcagtgattgtggaccagaaacttgcagagtgggatcagagagaccagaaacactgagccagttaagaagctctactagactgggcgcggtggctcacacctgtaatcccagcactttgggaggccgaggcgggcggatcacaaggtcaggagttcgagaccagcctggccaatatggtgaaaccccgtctctactaaaaatacaaaattagccgggtgtggtggtgggcgcctgtaatcccagctactcgggaggctgagcaggagaatcgcttgaacctgggaggcggaggtttcagtgagctgagattgcaccactgcactccagcctggttgacagagtgagactccatctcaaaaaaaaaaaaaagaagctctactagtttatatatatgtatctgtaggtatgaaagacctgtgttaagtcacccagatacttttggaaaatggttttgaaatgatgagatactagttttagcagttttttaaaaaaatagaaattactgacatttcagtgtcttatactagtacatatatttttaagttcagacattcaataataatttactaagtgcttactctggacatcctggaattatggtacacttccgtggctttagattacagacgtggtcagcaaatctgttgtgttattggagtaaggaagaacagctcagcttagttctcaagatgtggagattggagtagctgaatcaagaaactttctagtaaaagagggaagaaaagcctcaggtatttcacaagaggtattgcctaattcacctccctctcagaagtgtgccttctgatggagtgtgcactgcccatgctctgcactgcattcgtagcattcctgacactcaagaggaaggagaaatgtaggtaagaaggtgccattcagcaagctcattcgcatccggcagctggagaaatgaaatcaggaaaaaaagaaaagtgagcaaaagaaggagaaggaagctgagtagaaaagaacaggaaacgtattattataatataatgggcaggaatagaaatttctggcagctgccttagttaggttccatatgataggatgcttccctttgctgtctaaattttgtgctcacgaaatttggcttgtggaggataggttgggtaagggtagtagtacggaatcaggggaggaaggcagtctaaaatttatttgcactgcttgacttttaactttgtgctttggttcggagttttaacgaacggggcagagagagacaggtttctaatttgggacagggagaagtcagtcttattttgtatagtgtggcacattccaaaaaaaaagaaaagaaagaaaagctgttccatttatatgccctttcttccctcagaaagtgctgcattcagttgctttgtgatacttgtggtttaccaggttgtttttcataccagcacttgaactctggttttctttcttttttttctttttttttgagatggagtttcgctctcgttgcccaggttggagtgcaatggcatgatctcggctcactgcaacctccgcctcctgggttcaagtgattctcctgcctcagcctcctgagtagctgggattacaggcatgcgccaccacgcctggctaattttgtacttttagtagagatgagggtttctccatgttggtcaggctggtctcaaactcccgacctcaggtgatccgcttgcctcagcctcccaaagtgctgggattacaggcgtaagccaccgcctgtgccaggctgaactctggttttctaggtaagaatactttatttcctgatctcctgtagggggcagagtctcaaaagaaaaaggccaaaacctgttaagcaaacttctgaatgttttttaaattacctgggagactgttcattatatcagagattattatagcagatggaacgttaaaaattgatctgtgtttctcacaaacacagttaatctaaaccagctgcttcttccttttgtacctatgtcttctaactttgcatcctcataaaaacacaccttcagtgaaaaagctggtggcatagcatgttgatcttccaaaatgccaaaaacttcagcacattgtttttgatgagttttggctttacgtattattttaaggagaggctaattcactgtatttcatggttttagtgtgcccctttataagtttttatgtctacttagttcttccccctttaaatagtttggatgaataaactttagaagtggaagattgtatggagtagctctttgttatgatgtcatttacttgctattcaggggagccacaaatgttggcttttaaatctacaaaatagtgcaattggccttatttcattaaattatttctgtaagtgaagaattttctatatccttctttaaaatttaaacagccctgcagaaaaaaatggaccatggttatgcaaaaatgcctgaggttatggttttaaaaatatatgctgatacataacggtatatttcttaaatgtgtacttgatttttgatagttgtatctgattatgtgtgactgttccgtggcttcttctgcagctccagggttgcactgagcttaggaagccccagccatagtggtcttctttttttttttttttttttgagacggagtctcgccctgttgcccaggctggagtgcagtgttatgatctcggctcactgcaacctccgcctcctgggttcaagtgattctcttgcctcatccttccttgtagctgggattacaggcgtgtgccaccaggcccggctaatttttgtatttttagtagagacggggttttgccatgttggtcaagctggtctcgaactcctgacctcatgatccaccgcccccccgccccccggcctcccaaagtgctgggatgacaggcgtaagccactgtgcccagccttatagtggtcttcttgctgttcctggaacctactattatcatgcctacctctaggacccttacacttgctagttctacttcttgaaatttgaaaacttagttgtttcattcattctgtcatttattgtgtgcccagaaacttggatgcacctagatgggtcagtgctggaggaaagcagacatggtccttgccttcatgaaatttgcagtccactagggaagacatgaatcaaataatcacatcagtgaatgtcaaaaggcagctgtgacaattgctacagatgtgacgcccatgcattgggttagagaactctcagagatggtgccaggtagaactatgtgaaattgcagatttttcagtcatttttgacctataaaagtaaagacagttcagattacattttatgtttgaccctgaagtcacagaaggttcttgagcagagaagcacatgatgggaatggtatgtaggaacagttaatttggtggtacagcttttcggggacacctgtagcagcaaatgaggcatgcttcttcggtgaaattactggttgaggtttaaaattgtgtttggcaatggggaatctgtggtgctatagtattaatgctaaaacaaatgactatacagcttattaaaatatttatgaagtgtgtacctgtatgtgattctatattaggttattcacaaaatgccatataaattagattaaggcaatagctctttttttttttttagttaaaaaaagttttaattgacacaatatacatctttatggggtacatagtgatattgcaatacatatgtatagtgatcagatcagggtaattagcatatccattatctcaaacatttatcatttctttgtgttgggaacattcagtatctcccttctaggtatttgaaactacgtattattgttaactatagtcatcctatagtgctattgaacactagaacttattcctcctatctaagcagctctgttttctttaggaatttgacatttgtacctacctatttgcacttaatagatacatagttttcttggcactagcacacacagatatttttcctataatttcctagcaatcaagaaaccttgcaattgagtactataataaaagggcccaaggacttgtttctgagtgtgacaagagatgcaaagctcacctttggaagtgttccttgtatgactgttttgtaatctggagatgaaattggatggcccactgtagggcagtgttcccaattctgaactgaatttgaacatgttaacagcaaagacagcaagaaaaacagtgagcctgggggatcccctacaacattttcactgtgtcagattttatggttttactccttggctgctgtttaacctcttgggactgctgttggtaattacatctctctggcattaagagcttttttgcttttctttttttccctccaacccttgggaggggtaaacccaagaggtggtggggagaagttttgctgtgaattcttcagccatttagtgcaaattcctgtaattaccggcattgtgtcttctctgaatggcacataatacagcagaagccattcctaattgagaccttacaggaggtacaaatcccctctttgttcagcctgacaaattagtgccagaaagtggcagggtctgagtgggaatcaaaggcaagaaacacaaagatggaacttaaggctacagtaataaccctctcttgtcctggagggaaaaaagtaatgaccaatgaaaaatgaagttttttttgttataaattcccttgacatgacagcacctcggggctgctctatttatttagcaaaagtgattaaatagtaatacaacagggctgtccattgtttccctgggtgccccccaccatcacagacccctgctgcctgggctaattgattgacaatgaacctctgataaagaagtatgttgttaggacctggggtggggggtgggggggcattttcctcctctttgtgtgtttgagagagagagagtttcatttttgtttgaattgcactctagtttttctttgccccaccctacctcctctttcctctcctctctctcctctcccctgccttattttcctccctgcattttttcccccaaagcttttcagcggttgctcccagctatcgttcacaaacaggtagagggcaattagaattgtaggacaggcttttgatgagtttatctttgtagctaacttcctctccccgtactctgtttaagcctgaacagcagtatgagaagaaagaaaaagagaagggggctgattattggtgctttaagggcagaaaagttgtgctttttagttctttatttgtgggaatggatgtctgaaactagcctttgcactaagattttatcttaaattccttgctcaactttagaaaaaaatctatgtactaataacatttatatgcttagtggggggagttgtggaataagaaataaaaactcaaatttttagcctccccttagtaaccaagaagccaagattaattacccgaggataaaatctggctgcttttggtgtaacttagtcctccaaggatgctgtaagttgtgggaagatgaccaaaggattctaggcagataattaatagctcctagttatatatgctcaactagctaagctgaagctaaatccctaatttaactctgttacagctgcaaaaacaaatcatttcaagctcctatgaaagcaaaatatattaaacaaacattattgaccttgctaataccacatggcatttcatatgataaatgagggcgtatttctggcaaaggcctgttttatggcatcatttagacataaaggatacctttaccctagcaatacaagcatccttgatagaaagtatggggtggttaattactcattaaatggctgccagtctggaagtaagcagtatttctgggttggacctagttagttacttattggcttctgggtaaatcatgtagaatagcaattcttaagaaaaagggaaatcgaatttgggaacttcttatgaatgtgagtctaggtaaagaaagatctgttggtctctaagtgcccagaagggtcattgtgtattacgctcttgaaaaacaagaagttctaaggtagccaaaatctgttttcattcccatgtgaaaaattggggggtcctttagtagccaaagagccagatcttctaaggaactgagaggtggaaataaggaaattgactttccttgatatctccaattatcatctttactactattttcaaatttgtctcccacttagaagtaataaggtgaagatttattagagttagggaataggtatgtagctaattgggggaggaaaagacaatgaaggaaaactcagatatgacccttccccaaacatataaacaacttggatacatgagaaatgtttagcgtattgttgccttcttatgttgtattgtctaagtcattttcttattgagtgttttggattgttgtctcccagaggagaaatccctaggtatttgtgtgcgataaagggctaaattttatttttccaactttgaatataactgtggagggcttgcttatagtagagtccttaggtgaagttttagttgggagttttcaaacccctctttgtgtgctacacccactctgacaggcaccttgggatatgcaaataagaatgaggtgcaggttgtgctcttcaaatacttatagaaacacccagcctcccaaggctatggagggcttgaagggagtgagctgaagaatgggatggggtgaccaagggtcaagccatcatggccagtggcttggagaccattaacatccctgtctctgctcatgtcagagaatctgtactagagaatttgaaagctaaagagctaaagtggccccccacccccaaccccactttaaactttgtcgttagttcccacagaatttaactcagggaaaatctccttggcttttgctaccatctatcaaagataaaactttctgttgtgtgttcatgctgtagtaggtgctctgggagatacaagaggaagtgtagttgtggtctgtaactcccaggactttatagtctgagggcacacaaaagaaattgaggaatactagagaagtaggtcaggtctgtgctatatagcacttagtgttcaggaaagcatttggcaaagccctcaaaacaatgcacatactacaatctctgttaacttgggttatcagagattgtagtatgtgcattgttttgtgaataatttgcagttttactcaaggattgttgtctaatggttccctctcagtctagaagtttgtcagtaaaggtacacaataataatgagaagcagaataatttagtaattaagagcaaggattctggagccagactgcttgggtttctggttctactcaccagctgtgcgaccctaggtaaactacttaacctctccgtacctccactgtttgatcagatgtaagaaaataatcacatctgccttattagtttgtagtgagaataaattgagttaaaggacttagaatgctgcctggcacatagtaaatgtcatatgaggctagctgttattattaggtttgtgcaaaagtaatttgcggttcttgcccttacttttaatggcaaaagccgctataacttttgcaccaacctaatggtatttgctcacttacaactataattacctggataaagatactataggcatacttatcaaatttgcagctatcacaaaactagtttggagagctaatatgcggaatgacagaattgagattctgaaacgttaagctagaggatggatcaaaacaaacaagatgagatttagtagggagaaatagtcctctatttatattcagaaaattaaccacaaagatagaaggtagagaaaacctgagctaacagcagcccatgtgggcatacaaatgaggcagccgtgaagccagcatttgtgttgctatggctacatgaaaaccatttacaagattggtgcagtagctcatgtcaataatctcagcattttgggaggctgaagtgggaggattgcctgaggccaggagtttgagaccagcctgagcaacatagcaagaccctgtctccaccaaaaaataaaaaataaaaaaaatagcccagcctggtggctgatgcctgtagtagtcccagctgtgcaggagactgaggtaaaaggattatttgagcccaggagttccaggctgcggtgagctataatcatgacactgcacttcagcctgggtgacagagtgagatcctgtctaaaaaaataaaaataaaagaaagaaaaggaaagcttttacaaaacagatccataaagaagaggtaatattcttgctgcactctgccctggccagaccatatctggaaacttcagttatgtatgctgttctttaagaatacacatcctaggctgggtgcggggtggctcacgcctgtaatcccagcactttgggaggccgaggtgggtggatcacgaggtcaggagatcgagaccagcccggccaacatggtgaaaccccatctctactagacataaaaaaaaattagccgggcatggtggcaggcacctgtagtcccagctactcgggaggctgaggtaggagaacctcttgaacccgggaggtggaggttgcagcgagccaagattgagccactgtactccagcctgggcgacagagggagactccgtctcaaaaaaaaagaaaaaatactcatccacatctattgatgtgtgatagtgaaggagctaaaaaccgtagcatgcaaatcaatgtaacctagaatagggaagacacaagtattatcccctcatgtttgaaggctgtcacttagaggagaaaagagggttactatgtgtaatcctgttgggccaaggtaacaaaaatatgcagagtggattgtattttttcttatttaagaaaacttgatggccatgggtgaaaatgagtagaatggcaagaggcctggaattttgaccttaagacaagtcatttaacttgtctgatttagaattttctcatctgcaggatagagatttattcattcagcctttctgcaaatgtttatggaagccttactatgtgctaagcactatgctttctgcagagtgaacaaggcaatcagtctcattttgtgtccttacagaatttgaaaactggaagccagacaaataaataagtaattataacacacagttgaactcaaaggtcttagactttccttccaactcttccacctctgtctggcatattttagagggactgactttgctctgtgtggttccttttatctctcattttgtgatcctttgaatgtctatagagggttagagaaaatgagattaatgtggtccttcatttaaactttatttaataagtaatacgtttttcctttggggaagagaacttaaactagtagaaatatcaattgactaaggagacaggacatggaaattcttttcctggctctgatgtctatcattaaataaattactttactttttgcagtcttaagtttctaggccaggaaataattttaaataaaaataaatgtataagaagaatatgaatacatactaaagcagtaatgcgagtctatggaagaagaatgttatataatttgtgttttaaactatttcatatcctaaaattcaaagagatttgatcactttatataagtaggccctttgattttataggatataaatttgcttttttgatttattcctggtattctcatcatagaagtcacatgttggtctttgatatgtttcagaagaataaaatcattttgaatttcagaagatatagatcttttgatggaccttcctgaacttcataggccatagctgtgctgtcgtttttttttttttaagccgttcatttctcctagtctttgttgctatactttggtctggaaagttcttgtccctttttgtagcttcctttttggttaacattgttctcatcatgtgttcatttccggcgtaacttctaaagagagtgttaatgtaccattggattccacattgacttcaaagtttttatttactgacctttcactgggagagaaactggtgtaggtacagttttaagataaacttgggcaggttaagattctccttaatttctagctaagttccttgaaaaactaagcttttcatggacctaagaataaaagctacttgagagtttctaaaatctattatactccctgaagacagaaacatacttaagtgaaaaacttgccattttaaaatatatccactaggtaaggaaatctagtaatatagcagtaccaacttatttcttgcattaatattttcatctaatcatttgtacattcagcaaacttggaccacacacagtcccagaaattgaggtgtgggggtaaagtacaggttaattttgcagtaggataaatgcctgtatgtatggctatccatctttataccttgaaatatgttaacataaaaaagttttaattaaattacagtaataaaaacccaaagagcgtgaaactccctcccttttttcaggtgaaaaatggagcaagcctgaaaagcagtgagatcaggaggacagctgatgtttgaccatgttcgttatggttctgcattgtactttgttgaagacttctgggtgtgaaaaatcttttacacccctaaagactttttttgcaagactttattgaccgccttcccctccacccctaattctaatgctccagatataatcgaacatttctcctttgcagcctccctccctccactctcatggaatcctgtcatgggcctatgactttgcgttttacttttgtgagggcagggccccagcaccagtgtgtctaccccaggatctctcaaagtgtgatttgagtatcatttgcattagaatcatgagtatgatttgggtagggatgactggacccttccccagacctgttgaaatcagaatctctgggatttttaaacaagctttcctattgatttgagtgcatacgaagtttgagaaacaatggtttagcccataggaggttctttttttttttttgagacggagtctcactctgtcacccaggctggagtgcagtggcgtgatctcagctcactgcaacctccgcctcctgggttcaagtgattctcctgcctcagcctcctgagtagctgggactacaggcatgtgccaccacgcctggctaatttttgtatttttagtagagacggggtttcaccatattggccaggctggtctcaaactccggacctcaggtgatctgccggcctcagcctcccaaactgctgggattataggcgtgagccaccatgcccagccaggatgttcttagtgaatgagtcaacccatacttgagttttctctagtttatataggcacatttcctttaactatttcttctatatatgttcaatatgttagccattggggtatcaatctgctgaaacatctccaggtttccatgttttctttacattctggaaatgtcaatgatgttctaacagggtctacctggtggctagtataaagaaaggaaggagttagcccgaattctttacctacattccagcttcctttttaatacatcctaatatcatgcctaatttttattttatacttggtaaacatagttggtgtttgagttttgagatctcctttacctccctcactttatttgctgctgggtcatctttcaccaagatgactatagtgaccttctaaccagttttcctgctttcattctgactttttctaaatcttgtctcaactgcagcaagcgtgatcttattaaaattcagattgacccctgatagtcttctctttacaattcttcagtgtcttcccacttcttttggaatgaagaccagcatccttaatgaccctgcccacctcctcagtttcaactctggccttcttgccactttctcccttacacactgttccagccacactggctttcttctgttcctcagatgcaccactttctgctcacccaccttagagcctttgcatatgcagttgcttcctcagagtattgccatccccagcacgacccccagctcattcttcaggccactaacgtaaatgttactttctcaaaaacaccctctccatcccggcacactgacttaggacctatcagattctctccactgtaatgcttgaactgccatcccaacacccaccattaggtttcctactttcaccatcttttctaggaatccaaggttggagtcatctgtagatacagttaacatgttccctatttagcaaaccaattataatcttgcaagtttccgggcacgtctttttttttttttttttaatttttgactataggacctcttagagcctttattctactaatgtgagagaaaagtatacaacatttcctaacttacttaaccataataccctctctgcaggactgggttcctcagatataaggtacaatcccctgctctgggcactgcactgtcagtttatttgcacggtttatttgcacataatctgtttcaactccaattagatactgcaatacagttctgtcactgaccacccggaattagcacagacctcacaaattaaaggctcagccctctacaagactgctcccacttcagatgccagtgcaagttcagggggttcccaggccacctgcacagtgactgactggctacaaatttgagggttcctaccccgcctcaggtttgataatttgttagaacaactcatagaactcaggaaaatgctatacatacaattgcagttttattataaacgataaaaaccaggaacagccaaatgaagagactagaaggtaaggtgtgggagggccataaatgcagcacttctgtgccctctgtctgtggaatcaggctgcatcaccttcccatcaaattgttatgatcatcaatgaggaagctcctctgagcttcagtgtcctgagtttttactggggcttcattatgtaggtatgatggattgaatcattggccatgcaactgaacttaatatccagcctccttccccttcctggaggtcaggctggctcaaagtcccaaccctctaatcatgtggttggtctttctgttgaccaccccccattctgaggctatttagtggcccactatgactcaccattagcataaactcaggtgtgatcttaggggctcgtgaataacaaagatattcatatcacttggggaaattccaagggttttagaagctccctgccagagatcagggacaaagactagacaaattgttatacagtagcccaggacattgaatggacatttccacagcaaaaatggaacctggatgaaaggaggatgaatgatgtgtgtaatttccccccacagaatgaggaagctttggcctacttgccctgttccctcatttccagtcagctacttccaacactgacagcatccacctggggaagggagatttctggtgatatctttttgggtgcttctgggaccaagcagacgagaaactgaccagctctggactgctcagcttgtctgcagccctctcagagccgcaactcagagtggtgggacgatgggcaagcacactcagtgactctgtgatctccactatctaacccagatatccttcttaaatcttggctaaaaatagaaggtgtttctttcttaaatggatataaaagcaaccacagaattgattttatttattacctttaactgaaaaaaaatgtcgtacttaccatataccacttccagaaggaaactaggattctaaaacctaagacatatgggtttgtatcaatttccaaaagattgaaaaatcacattctaactaggtatatatcagtgtaccaaggactgtgccttacccatattttttctataaaggaagtaaatcatgtagggctgaaccaaaaactttgctgaaaattgcttctcttttaaatcagcagacttgtacctctgacacagaggattgacttagtttgagtcttggtctccttctccatcttcatcaataaagatgtttttcttgagccccagaccagacaaaataatagacacacatgatgtggtggctgggaggcatccacactcagtgggataagtaataaattaggagcacaagagcttggtcttctgtttatagtcctgccactgatttattatatggccccgagccagccttttcacagtcttgtgggtcagcctcttcaacactattttgagggaagattaaactgtcttgactatgtacaattcaaatgttagaaaatatcagttgaaccaaaagtgacatatcctaattcagtaattagtacatcactgcaattttttcccccagaaactacagggaggctccccaaatgatctcttagataaagagaagtcgtcttatggcctcataatggatggaaaacctttgggaaaatgatgtttctcatccattgttaggctagggagttttaacttgagtaaaagtttcctgataatgctaaaggtttccaggcagcccctttagcccgactctcctgtgtgatcttcatctctcaataatgtcacccaccaacatgcatctgagtgcctttccctttcctctccactcccattattagatgctgtctgtgtgggccaccatccttgcaggagttttacagggttaataaatgaataatacctcttctttcttatgccaagaggcaggaagatggggattaaaatatcacatatattgcttccagatcacatttattattatagagtggacccctaaattagatggacttactcacctggccacagctggagtcctgaagggcatgatgtcctcttaccacagcagacagaaacctgcttcctgaaggctgtgatgtcctcttatcacagcagacagaaacctgcttcctgaaggccatgatgtcctcttaccacagcagacagaaatctgcttcctgaaggccatcatgtcctcttatcatagcagacagaaacctgcttcctgaaggccaagctgagcatgcccgggtccttcttcttaactcagcagtcagatacctaatttcccccatctgtgaggagggctggataagggatggggagagaagctaggaatatcactctagggaattccccagaagcaggagttccagataataggagttttccacttgtgtcttacctagtaagtctaaataacctgatacaaatagcttattgcaaatactaaatgtatagttaaaagattagctttggaggtagtcacaaacatgtgcttctaaaaagatagaaaagcctggaaagaaggtgaaagggaaaagaataaaggaagagaaaatacaccaagacagtccctaaatcttgtacaacataaataatttggttggggtgaaaacgaagaaattcaagcatggatttaaaggaagctgatgaaagtaatctttttcactttgagactgttcctagcactactcggatccactcttatgactttaattttatcaaattgttatcattaccaaaatggctcaagtagaattactctaagaaatgctgtcagggttttttaggaggttttagcaaaggagaggacaggttttgttttcaggatactgtaaagttcaaagagatgagactctcctaaaatatgaggaaagagaagcaggcattaggaatggggagtggcatgaaagagaagtcagaggggaccctggtaggacactgtatgtgatagaagctacagagtggaggagactgatgtaagaagcgacttctaaataaatccaagctgggagaaaatgttagttccagaaacagtaagaaaagacaggttgcttttcaggtaaccccccaaaataatctgaacctctaagccaataggaggttcttggccttttgaagcaatcataaaagagagatgtaactggggaatcacaaaaagagagttagtagtggtttaatataatgctaaataccaggggaaatcactgtagaaaatgttaagtgcagcatacattggattctctgtgaggcaaaagtgttcagaacaggactgggactagggtaaggtgagagaggcatgtgctttgggtacagaatttaaggaagtgctgaaaaaccctttgtaataaagattttaaaaatatgttaatatgatattctttaaaaatcaaaattaatgtaaaaagtccatgatgaacaaaatataaaagcttaactagagacaggattagaattcctgatttctccttttgtctcgggttctaatatggcttggcactggttcagagaaacattccagtaagatagtttattttattttattattattattattatttttgagatggagtctcactcactctgttgcccaggctgaagtgcagtggtgcaatctcagctcactgcagcctctgcctcatgggctcaaacgattttcctgcctcagcctcccaagtggctgggattataggcgtgtgccaccatgcctggctaatttttgtatttttagtagagacgggatttcatcatgttggtcaggctgctgtcgaactccggaccttaggtggtccgcccacctcggcctcccaaagtgctgggattataggcgtgagccaccacatccagtcaagagtttatttaattagacatcttcccctgaagctctcagtgcttcaagtagcccagcccagcatttgtcttgtttcaaggatggtgagattgaccttcctttcctgtctgagattgcaggagaatatatagagaatcctggtagccccatgttgaaaatagaactgatagagaaagagggaggtcaactatgacaagaagcattctttccatccaccactaccagctttcatgtctgaaatcatcagctcagctgagccctgtttatgcacttgtttttcaagtaagagttcttggtgagcagtgtttcaccaagattaatttgtgaagaaaagagccaagcttggagcagatgttactagcaggtagtctagtagatgatggtgcctctttttcatgacactaatttaacctaccagcataaatcattttttaaggtaagaaagtagaactggtgaaagggcttttcctccttcccgtaatagatggtatatccattgctagcagagaaaagtgattaagtaagatcagcatattcatctcttattttgccctcctgtctttctgttgtcatagggtttttccaacagtggcgttattgacatattaggccagatacctctttgttgtggagggatgtcttgtgcattgtaggatggttagcaatgttccttgccttcatccttaagatatcagtagcttacccacccatcctaccaaaaatgtctgcagacattacaaatatcccctgttgggacaacaatctcccttggttgagaatcgctgtgctaccaaaggtcaaggcctacaatgatgtcttcttttcttcatctagctttttctcacttctttataaattaattaatgtcttctgctgaaatagatgttgattatttcataccacatactttttttttgttttgttttttgagacagagtctcgctctgtcacctaggctggagtgcaatggcacattcttggctcactgcaacctccgtctcctgggttcaagcaattctcctgcctcagcctcccaaacagctgagattacaggctcctgccaccacacccaactaatttttagtatttttagtagagacaaagttttgccatgttggccaggctggtcttgaactcctgatctaatgatccacccgcctcggcctcccaaagtgctgggattacaggcgtgagccaccgcgcccagccaccacataatgttttataatataagacctctgcatcttacgtaaatttaagtgaaagtagtaggttataaaaataggaccttcaccaaccatcatttgatatcaagtatatcaaatgctttcagtagcaactaacagaatatacaattcaaactgatttttacaataagggggattattcttaatcacctgagctttaagcatcagtagatctggtagctcaaattttttgaactatgttttttggattaaatgcttcaaatagcattttctcccccaaaccacctgctccttctaattgatggatttctcacatgagtcacaggcttgaaacatcatgagcatctttaacagtccctttgcatgcccccaacgtctgtcagttgccagatcatctgcattttgtccccatgctatctccttctctttctttcttcctgtttccaagaccaccacctaatcaagtcaaactggtgcagtaacttatcaactagttccctccccttccagcttttcttgctaattaatcttttcaaagcgtacattgcagctgggcatggtagctcatgcctgtaattccagcactttgggaggccagggcgggaggatagcttaaggaaaggagttcaacaccagccttgcacaacatagcaagacccctgggtctctgcaaaaaaaaaaaaaaaaaaaaaaaaaaaaattttaatcagccaggtgtggtggcatgcacctgtaacctttgatacccaggaggctgaggtgggaggatcacttgagcccagggggttgaggctgcaatgagccatgattgtactactgtactccaggctgggtgacagagtaaaaccttgtctccaaaatttaaaaaaaaaaattttttttttaagtttactttgctactctgcttcaaactctggttgttcctatatctttttttattttttttgagatggagtctcataccgttgcccaagctggagtgcaatggttcaatcttggctcactgcaacctccgcctcctgggttcaggtgattctcctgcctcagcctcccaagcagctgggactacaggcacccaccaccacgcccggctaatttttttgtgtgtgtatttgtagtatagatggggtttcaccatgttggccaggctggtctcaaactcctgacctcgtgatctgcctgccttagcctcccaaagtgctatatcttattaattaggacttctcactctgagcactcaggattcttatgttctagcttcactttatcattccaagctcttttcttcatactcctctatttacaatgagcctcagacaactagaatatccagtgtttccaaaggtgcttccatttttctgacttgagcctttatgaatgaacgttccttttccaaaatctcttctcttcttcaagacccagctcaaatgcccctgtgtcgacacagccttcctcgatctccacaatagtgattgcttcctcctttcctcatctcttatcttctgctgtttactttatagatttgtattcttcttcccctcacccttcatcttcagaggtgatgctaatgcctgtgatgtcccaggctatattcattgatgagctaaattatgttcttttatgtaaattgattcatagtttttgtccttgttttgtcatctgcaggggacagtttttctaatgtcttacaaaaggagataactacctgaaaatgccacattgccacttttattaggctctgccttttaagcagctgtacaacagtggacagaattactttttcatcttctgcctcagtttcttattctgtaaaatgggcataatacctacctcatagaattggtatgaggattaaatgaacagagacatacacatgtatttacatatgtttgtttgtgtgtatgtaaagtagttatgacagtgcctggcttatagtaagcctgtcttacataaggtgtttgcttataatgtgtttatccatttgcttagttcttatttatttatttttatttttaaattgcttaccattttcttgaaagactttggggaaagaacatagaagtaaatgagaaagtctagtcatagactgttaggaaaaaaacaggatgaaaaaaatactaagtttagactgatttcaatatactagaagctgaatttgtaagattttattattaatattaaacttatcttacaccaataaaagcactattgaagcatcttatcctaagaaaaattaaaagtaactcaacaactcaagtcatgtcttcggaagtgaaaatctgtattacagatcattatacttacaacttttggggtagatatttcatagaaagcagtcagattctctaaaatggtgtacatatttacttacgtgctttagcaaaaatcaagatttattgcctttcaagataaattttgactaaatattgactttaggttctcaatcattgtttacctgaaagaccaataaatcttgacacttctcaacttgagttggaatctacttggtatttattaatttatttcacacgatttataatcttaataacaacattccatgagattaaataaacattgtagagtttagcaagtttatattttcagtcagcagtaattacttgacatgtgattttcacttcatttcttatttaaatatagtacctctagcactgttaacacaacgtaggtcctacatgtcaaagctgacttagctatttaaatattcagagggggaaaacccaaataactcttaatagcttatagaattgctttacattttaaaccaattagtattcagattggagtttctaatctgaattgattttatttttttggttgccttagttctgcaagtataatctactaatacatgattatacgtcatagatggcctctgtcttggacagtttatgtctgttggttttgatctctgtttcatgcatctgtctgttcttgtctctctctctagatataatgtgtattgaacattcactgtgtctcagcacagtactaatactttacaaacataatatttgccatattgttgtgttgacagggtttttagagacagggtctcgttctgtcacttaggttggtgtgcagtggtacaataatagctcattgaaccctcgaactcctgggctcaaggtattctcctgcctcagcctccaaagtagctgggattgcaggtgcagaccaccacacctggctaattttttagaaatttttggaaaaaatggggcctcactctattgcccaagctggagtgccatggtgcgatcatagctctctataacctcgaactcctggccacaagcaatcctcccatcttggtctccaaaagtactgggattacaggtgtgagccaccagtgcctggctggaaattctttggttaggtacattcagtgtgtctaggaggagttacttacttctgtgagattcttaaggacagagctgtcctagctatagcagtagtccattctacaagtgccagctgaagttaacctaaatgtgtgtcacccatggtaggaacatggtttttaacatgtcagctctctgtgcagtggaactttattctttttttttttttttttgtagacagagtcttgctttgtggcccaggctggagtacagtggcacaatctcagctcactgcagcctctgcctcccaggttccagcaattctcctgccccaggaaaagcagggattacaggcatgtagctgggattacaggcatgtgccatcacacccagctaatttttgtgtttttagtaggggtttcaccatgctgtttttagtagaggtttcaccatgttggctaggctggtctcaaactcctgaccccaagagatctgtccacctcagcctcccaaaggattataggcatgagccaccacacccggcttgtgcagcggaaatttatgagtcagtttcagccaacaaggaatgacaatttctcatatataatctctcactgctataaaatttgtagatgaacataaaacgaagcccatcagaaaaaaaaattctgatgaacagaaatgaatttttgtgtagctttggaaacaaccatcagtacatttcaggattgtatttgagcatgtgtatttcctcccaactgtgaagttttcaactcctgggaagagaattcactatgaagggacttaaaggcttatggagaaaataattttgaagtgttgcagtctaaagtccatgaactcaacccaaagactatcagctgcatgccatactaatccgcattagcaattacacgtggcacgcaattgattttttccggatttcccctattgttcctttagttttatttgagatgctgtggatactatttgctttgtaaccgacagaacgtatacttaatggcatgtgcctgattctccatccaaatgtttaatgtcttaattgatttatggctaaacagatagctcctactttatgggtcaccaccttgtcccaaagacagaataacttggatgcttgggatgcaaaaagtattggatcactgatttttgagtagatgtttctcagtgtccctcactctttaccccctttctactttacagttatgtagaattctatagcttcagtttcaccatgttaacttcagactacatatgtgtggtcagtctcaaatttcagctctgttccctctgacagtggaggatgcaaatatggggcccaggtttgctttgcctctacttcctttaatggacctcaaagctacattgcaaaaattgcttgtgccctgtgtcaaataatcctttctttaaacactgtgcccaactttgtgctaatcccagggaggactttgaattgtataccaaatgtaataccttattttttaaagtacaggttcaaaatttcactacttaatgagccaatggttagagactataagctaggaaagctaagttatttatggctttaacccctaatccttgtaaaatagcaagtccttgaacctgcatgtctatttttcttcattttgggaaatctggtctgaagagcatatgatcaaagtctaggccttcaagcaacattttacacagtgcttactgcagctcactgtccccagccaggaaaatggagggatggaaggagggacagggaagtccccttgctcattcctgtggacatctctccctacttagtgcataaaataaaagaggatgtgaaactcgccagatatttttttctatttttacagagaaaacgacaatgtgtcttctcaccctctttatctcttttccttccttttacaaaggcaccttcttttcttttttatttgcccttgttcttttcctagagcgtttctaccttctaaatgcaaaagactggatttaccttactgaattaggtaaaagcttactttaagagatggaaagtgggtggcataactgaccacacttagcactgtatgaggtccttccttagtgagagagattcagttggatccagccacagctttctcattcttccctcttagcccatgagttttccaactgctggtcagggaaaggagaactgaaggtaatagtcgtaaagtagagagaaagtggctggctcttcctcaagatcgcagcttcagtaacaacaactgcagccagttgagttaactaggtacacttgttagaagaaagatggtgcttttgtggagaagtatgccaaaattctgcacaacccccagcaacagattcttttgggtgtatttagtgaaaggccatttgggaaatggactgtacgtgcagcaaataggattttggttaaatggtgacatttgtttccaagagtgtatcagaggggaggctaagctcttcagagcatgtgttcattaaagatttgaagtggagtgggaagcaataataaaaaaaaggccagtgggttctctggtgagatagttttttgttcctatgaattgaatacactctgaaaagtttcaaaaagagtctgggaagaatgtatttgctttgatccaacatgtggagtgttctttactacaaatgccctttaatttagaaacattgctgaaaagtctgtttgaaagtacataaaaatataatatgtaaataagccctaattagttatttcaattaattattttttgtctctactttacagctctatttttcttcccataatgtcgcttttcagagtccagctttgacactctctaaaaaaatggttttttgtaacagtgattattaagaaaaaattttccctgttaaaaaccccacaatgataaagtaaaatcccagattgtgtatttttatggggaattgtttcagacatttttagtccatgatttgctactctgatagtaaaggaaatcttgcagttaattgaaaaaactcgtgtttccttcttcaaataaatggcatgtgttgttttttagaaaatgaatctacatcaggccactaactagcctctaatcttcttttccaaccattctgtgttctttcaaatacaaatactttggatttgggggttaaacgttttcattctttttaaagtgaataggatactcccagtggagacaagaatgctctggaaaaacactggtaaaatgaagtcaggttgtttctacatagccagttttttagaaattgactaagtacctaaaatattgatttttttgaagcctagagggtaaactgtgtgacaaattctgagcttttcactgagcagtctgcaccccctctgcacttttgttgaatagaagcagaattttagagctcgagggaccttggaggtcacctagaaatcagggagcaatcctcagcttttacccgtcaacgtcccgcgtgtgggttggggataggatgggagggggaggatgctcatttcattagaaatgcagatttctggtccctacccaagatctacagagtcaaaatcatctcagtgggaagaagggtccatatttctcacaaacgtctgcagaaaattccattgctcactcaaatttggcaattcaccaattaaagctaacacgtttattttgtggtgaggaagcaaggcctagataatttgatggtcagggtcacagtggtgcctaggcaagaacagactcaggcttcctgcctttagactagtgacggtctgtataccatgtgcctaaagtagttctgagcatgcagacaggttcaaacctacttctgggtcattagggtgatttcagcaccaggagtaggatagcctggttctaaataaagtatgaaagtaaagacacccaaggactaaaggtaggtgtttatgtgctgctgcttttgtccaaactaaaacctgaatggaccctatccatgttctctcatctctgtcttttatgagcctggagacctgtacatagttgcgaggatgtttaactcagttagttaactgagttgatcccccagcatggtgagctttggatctgtgtgcccggttgatgtgaacattcttaggctataggctttcttaaaatgcatgtttgtgtatgttaatattgcctatgtgtgttgcatccagaaaattagaataagctcattaaaattatagacagataaatccagtagtgcctactagggaatatataaatatccagcaaatgcttactgatgtctgttatatcaaaaaaaattttttttagtgttctttggtgagaatttaaactataatgatgatcctgaatttctgcaatatcatggtcaccttttaagtcattaggaaggattggattctactcagtgtcattttagtgttcagtcaatttgtctactaatttttggaaatagcagtatcccactgtctaggatatattaagttccactgaactctgttccacagttcattctttctttctttttaaaaaatttttttcttttgagacagagccttcctctatcactcaggctggagtgcagtggcatgatcacagctcactgcagccttgacctcctaggttcaagtgctcctcccacctcagccttccagtagctgggattacaggcccatgccaccacacctcactaatttttttgtagagatggggtttcaccatgttgctcaggctggtctcaaactcctgggctcaagcaatccaccggccttggcctcccaaagtgctaggattacaagtgtgagctactatgcctagccagttccatggttcctatgtgaacatgggtaatatatagttcttagaatgggcaacatattttaacagcgatattaatgaaaggctgttttcagaagcaggtgatcaggttaagaggatcagttttggaatcactacggaaaattaaaatttctgtatatatatacagtttatgtgagtgtacatgtgccagatagtactcagtttatcatccctttaacataaatatttattgattgtctgctatttgtaaagctctgtattaagtgctgaggataaaaaaaagatctggaccgggcatggtggctcacacctgtaatcctagcactttgggagtccaaggcaggcggatcatgaggtcaggagttcaaaaccagcctggccaacatagcgaagccccgtctctactgaaaatacaaaaatttggccaggcgcggtggctcacgcctgttatcccagcactttgggaggccgaggcgggcggatcacgaggtcaggagatcgagaccatcctggctaacgtggtgaaaccccatctctactaaaaatacaaaaaattagccgggcgtggtggcgggcgtctgtagtcccagctcctcgggaggctgaggcaggagaatggcatgagcgcgggacgcggaggttgcagcgagccgaaatcgcgccaccgcactccagcctgggtgacagagcaagactccatctcaaaaaaaaaaaaaaacaaaaaaaatagaaaatacaacaattagctgggcatggtggcacgtgcctgtagtcccagctactcgggaggctgaggcaggagaatcgcttgaacccggaaggtggagtttgcagtgagctgagatggtgccactgcactccagcttggacaacagagtgagactctgtctcaaaaaaaaaaaaaaaaaaaaaaaagatctgaggagtttctagtgtggtcctggttggacaagcccataaaaaggcatgataatttaaagaggcacgcgctaaatgccaaatgagtaatgcagtcagtgagtgcagtgaacagcattccaacattcgcagacagccctgtgactgtggcaagatgtcctttgtcaatcaggagctacatgtgtgttggttctaactcatctttcacacatttctcattccttagccagtctgaagaacaggagcttgttatgattttttttttgctgctcaatagtaaagaaatagccattctagaaaggaactggatcaagctctggaagcctaatactaatatatttacttatcttcttcccatttctcatgtatttaaaaacaatgagatctaattctctttctagaggatgcactgggaaactgcttaattactgatgccattgtatttgtgatgaaaatgaaagttctgttgagtcttgtgatactttcattcatggagttcatgtgaatcagaatcttcttaggttggtagttcgttaagtaaatgtatttgacctccttgtaatggaaagggttacaacactgatcattatattattagtactagtagtagttgtcgtagttgtagtagtaattgtagtagtactgaaagagtaattcatttttgccccacttcatgaaataggcttagtgcgcatctctttgatccatatagttcttggcacccaaccataaaatgggccacatggaaggatttctaaaatgaaagctgtagaccagaaatgtcagattaatgatgctgtttgtgtattcttgatgacctgttctggatctgccaggattttgtccttggggatgattgtgatggaatttacatactcagtagaaggtagttcttcctatctaaagaaaacgaatggcttccctatggaagggctatgattattaccaggttcgctgacagtaccaagacagcgctcacagagtcatggactttcttagatctgaaaagggcattgtaggcaaccagtaatcttgggcaagatttgttgaagtaaagagcagagaagagggtgctgtgtaaggagaggtaatacatgtgaatatatggagggtggagtaagcatgctgtgtttatttggggaacaatgaggagagttctctgactggaataaagtgattacgttcccgttggacagtagtgggagggaaagttagaaaagtgagatggagccaatcagaggccaaattccttacaatgatttggtaagcaaaggaaggctacataacagttttggggattattttagcatccaatttagagccaaatccaaactctggctttttttgactgggtgaactcagacaagatacttaacctcataaaaatcttagattcttcatctataaaatagaattaataatatcttcctcatagagaagtggtgctggttaaacaagattctgtatgagatgccttcagcaaagtgcctggtggaaatggagttctgagcagggcagtgaggagataaaggcgaggttgtagagagactgatctctggcagctgtatgcagaagagatggaatcagaagaaaccagagacaggggaccagttgatgacccttacagcaataccctaggaggtgaagggacaggctgtcagactaggaagaagaggacacaactgtacaactctattatctgtaacttcttttttgttgcagactaggtaaatgaaatataaccttgttctgtgatgttagagctctataaccttgttctgtagtattaaaagtacaacagcaatcatagactcttcctttttccttgaacaggctgccagcgatccataggtctttccaatgggaaagccaaggtgtgcaactacagtgggtggtattactgcagtagctgccacgtggatgacagctttctcattccagcacgcatagtccacaactgggatacttcaaaatataaggtaggtacaaaaactcagttcacttaataataataattcaggtgttcatatgttctcaggtggattataaagatggtgatcaaacaatttgaagcagatatgattaggtagtctcataaaagctgcaagaccttacctaatgcttcttatatatctcacagttgaaaggcttcttaactatgactcttattagtttcctcatttaaaaagacatatagagcagtttttacttctggtgctagagagaattctgagagagaggagcctcttttattattttttatttgatcttatcttcaacattacaacactatgggaagataaaaatgggaaaataatacatgcatgaacatgctagtgatctttctaggcaaggccttatataatccaagatatttcttttgtttgtttgttttgttgttttgttttgtttttgttcatttgtttgtgtcggcttttttttttttagacattgtctcactccatcacccaggctggagtgcagtggcatgatctttgctcactgcaacctccacttcctgggttcaagtgattcttgtgcctcaacctcccaagtagctggaattacacacatatgccaccacgcccagctaatttttgtatttttagtagagacgggtttcaccatgttccccaggctggtctcaaactcgtgacctcaaatgatctgcctgccctggcctcccaatatgctgagattacaggcatgagccactgtgtggtccgagatatttcttatagtagagtagcgctcctactcatgtgaaggtcagtcttctagcaaatccaggcctttggaactagaaccagaaccttgagagaagctgtgaagacttctgactaggggccaacagtaaggaacagtacactgagccatcctcaggcctttgtcagcactgctgttttttaaaaaggagagcaagtgagaatcacaggtatatgctaatagctttgcaaagtaactgctaacagccaaggaggctcttcaggaagtataaatagcaggcttagtggctatcaaaatgcaggtcaatagaggagaaaagtgagcacggggaccctccaacttaggagcctagagacaagaggagggaccagcaaaggaggccaagaaggagtgagcagtgaggtagaaggatcccagggtgtctgacaagccacgtgaagaaagtgtttccagatgaattgtgacagatgctgatagctcaaataagatgagcactgagaactgacgatttgctttagtaatgtgaaggtaattagtgaccttaatgaaagcagtttgaatggagtggtgggagcaaaggtctgattgaagtgggttcaacatagaatagagagagagaaacaagaaacaagaatagacaactcttttgagaagttttgctataaaaggaagaagagaagtcaggagtaacttgaagggaagtggggtcaagttaggtttgattttgttgttgttgttttaatggaaaaaataaccgtatgttttctatgctggtgtaaactatccagaagagagagaattgctagaatgatatggttgaatcagtaagaatgatggaattgcgtgaacaataggagggtctggctattgcttggagcatggaataagagaaaaaagctgtctgcagccataggggccagtaggtacttcgatgtgatgttggaagcttgttgaagttgtattccatttatatcagtagctttcatcagattcttttatttcagcatctgtgatcttaaagagatgaaatacccagtccaagttaccctgtgaagtgccattatcttctacttcgtagagaaaataggggtgattatgcaataatcctgtcaactgacctataaacgtgcctacatccgcatctatcctcattgtcctccttccagccaccaaagaaacattacttgtcatatgaaagtttatcccttctgcctgtattcatggtcttctcctctcgtctccatcacagttttgccaaatctcgtctcttctccaacacaattttgccaaatctgttgacccttggcagtttcttattctactggacttctctaggatacactatttgaccagatggaccatactccttttgaattctcctgccttggttttgacaacacacccctggttctcctccctctaactcttctttttcaatcaccttctctaatttcttgtcctctgcctaaacctttaatagtgggcttccttaagattcattattttgtttcccactttcttgtctttctattgggcatctccctcacttacatcattttaactaccaggattcttatgctgataattcctacttttatctgcagctccagttttgctactaaaattgaaatctgtggctttaattgcctattggacatctcgactttattttcaacctagtagtcttcaaaatatataaattggttagctatatggtacagcatttctttttttttttttttttttttttgagacggagtctcgctctgtcgcccaggctggagtgcagtggcgggatctcggctcactgcaagctgcgcctcccgggttcacgccattctcctgcctcagcctcccaagtagctgggactacaggcgcccgccactacgcccggctaattttttgtatttttagtagagacggggtttcaccgttctagccgggatggtctcgatctcctgacctcgtgatccgcccgcctcggcctcccaaagtgctgggattacaggcgtgagccaccgcgcccggcctatatggtacagcatttctatccttgcattaaaaaaggtagtagaatttggcaagtccaggaatctaactccctactggagtagcactctaggcttaggattctgttatgatcctgcatcttacacacataatagataacatacttcaattacctgatatgaccagaagcttttctgatccttctgccagaatgttgtgacatctgccttgaatgtaccttctgtgcaaggggcttcatatggaaacaggctgtatgactgcttttaaaattgatccataataattgtacatgtttatggggtatatgtaatattttgatacatacatactatgtgtaataattaaatcaggatatccatcacctcaaatatttatcatttctctgggttgggaacattcaaaatgttctcttctagctatttttgaaatatacaataaattgttatgaactataattgccctactgtgctatcaaatactagaacttctctttcccactatatttttatacccattaaccaacctttcttcattcccctcttccccctacttttcttagcctctggtaaccaccattctactcactacctccatgagatcaatttttttgctcctacatatgagtgaaaatatgtgatatttgtcttgtctgtgcctgcctgccttctttatttctttattttttttgagatggagtcttgctctgttgccaggttggagttcagtggtgcaatctcggctcactgcaacctccgcctcccaggttcaagtgattctcatgcctcagcctcctgagtaactggaactacaggcacatgccaccacacccagctagtttttgtattttttagtagagacggggtttcaccatgttggccaggatgatctcgatctcttgaccttgtgatccaccctcctcggcctcccaaagtgctggcattacaggagtgagccaccgggccgagctggcttatttcactttaatttccagttctatccatgttgctgcaaatgacagaatttgctgcatttgacagaatttgctgcatttgacagaatccatgttgctgcaaatgacagaattttattcttttttcaaggtgtggagtgcagtagcacggtcatggctcactgcagccttgacctcctgggctcaagcagtcctcccacctcagcctcccaactagctgggaccataggtgcacatcactacatccgactaatttttgtatttttttgtaaaagagtcagggtttcaccatgttgcccaggctggcctcgaactcctgagctcaagcaatcttcccacctcggcctcccacaggcatgagccaccacacctggacaagaatttcattcttttttatggctgaataatatcccattgtgcatatataccacattatccatttgtccattgatgggcacttaagttgattccatatctaccaccttttggttatatatctagcagtgagattgctgggtcatatgttagttctatttttagtttattgaagaactcccatactgttttccacagtggctgtactaatttacattcccactaatagtgtctgagcattcattcccttttctccacatcctcaccagcatctgttattttctgtcttttgagtaatagccattttaactggagtaagatgatatctcattgtggttttgatttgcatttccctgatgattagtgatgttgagcattttttaacatacctgttggctatttgtatgtgtttattgagaattgtctattcagatcttttgctcgttttaaaataagatttatttttgttgctactgggttgagttgcttatgtattctggttattaatcccttgtcagattaatggcttgcacatattttcttccattttgtacattgtctcttcactttattggttgtttcttttgctatgcagaagctttctagcttgatgtaatcctacctatctatttttgctcttgttgcctgtgcttttgaggtcttacccaaataatctttgcccaggccaatgttctgaagcattttttcaatgcttccttctggtcattttatttgtcaggtcttacatttcagtctgtaatacatttttatttgatttttgtatatcctgagggggtctagtttcattcttctgcatatgaatatccagttttcccagcaccatttactgaagagactgtcctttccccagtgtaggtccttggcagctttgttgaaaatgagttggttgtaaatgcatggatttatttctgggttcttgttctgttccattggtctatgtgtgtatgtctgttttgatgccaccttgctaacagatgtctgagacttactttcattgtaagtgtgttacctgggagcaagtaggtgggaaagggccctagagctgtcacctacctggaatcgttggtgtctaataaaataaacatgaaaattgtgagtggtcaattggcttatgtccttttctaatatatccctgggcaactctgtgtccagttctacccaataatcatccaaatcttcactgttttcaagatgcctcttcctaagtattctcagcatatgaccttgtctcctacttcaaggagaaaaatgaagttatgaaatatgaatatgaatatctacaaatctatctatatttgtacctatcctattttccctcctaacttgagagaaagaagaaccccttctcttgtttagtgaccatctttccacctgtgctccagatatttttatccatctagggaatccttgcttattctttgagagctaaagaaggcatgtcctccgtggtgacagcttttttgttgctcctcaccattccccattgactgcattgctggctctctccttcgtgccaccatcgtgtcatgtggcccttgaggattgcacttattaagggattaatagcaggagcttggagttaaaacctctacctgttatcaggtgcttgatttgttggggcaagttgcttgaatttcctagagcctcagttttgtaatctgtaaaacgagcccagactgccagagctcaagtcttagcattgtgacttgttagttagctgtttaacctaggcaagttatttagactcttggtgtcagtttcctcatatgtaaaatgaggatattaatgccttacagagttactgctgggtaaatgggttaatgcatgtgtcatgattagaacagtgcctagcacatagtgtgtaccaaatttgttctcatcataatttcacatatttacctaaaagagttgtgtgaattggggtaatataagaaaagcacttagcaaatgactgtgataagcacttaattaatggaagctgttactattttcattatcataacatctatataacagctagttgcttgtctattttctctataaaggtgagctctctgggcacacggaatgtgttttagcacagttctggcacatagtagacaagcaggaatgtatattaaatgaatgaaagaatgaagcctgtcccctgggaacatcaaactcaacagttcccaaattggccttatcacatcacactcaccagatgttcccccaagtgcacattacctgtcttagtgaatgccccacagtcaccactgccagatatgggagacatcctggactcctccgtctgccacacctacgctgcctaagcaattagcaaaaccaagcctttattttagctcctgaggccatgctctccactgtactccagtcccaccacactaactcaaaccctcagtatcacttacatgaaggaagacagaagcctcctatttgcgcttcctgcctttaagcatcactctctggctggtatatttcaaaagaaaagtcctaatcttaccttaagtaagtttcttactctctctcagtcttagtttcttcacctttagaatggaaataataatagaacccagttcataaggttgctgtttgcttaaatgattcacagaaagcacctggcacagggtgtggcgcatcataagccctcagttatggttagctttgactacaattgtatacaggacaaatacaattctcttagccttcgtgatccttagtccctgcctgccttcctagctccttcatccataaccgtttcccagcaccaatctcttcattaatagtacagccatccgtctatttccctgtcataccgtgctgtttcacacctcttgtcttcctcttgccctcacccacaacagcaaatcctaaaactcagcttaaaacctcttttcctctcctgattgtttctttcctctctaccagacaaaattatcattctatcctctgcttcttgtacttgacactttgaatataggctataaatatatttgccatgtgtgtattagataaaaacttatttagagggaaagaatgatagttgagcttggtttagaagttttggattaatctgcttggagcggggctttgacagctatgagaggtgtatagagagcaagtgagtgaggcaatccgagccctgtgatccattgagagcttaggcgtgtggcacttgccaccagaatacacaccaattagtaaagcaaaagcagaaaaggtggcactgaataagaaaaatgaaaaggcaagcatggttgatgatggcatgaaatggaggaggagatccgagtctgtttgcagtgagctctgaaggtcacagaaatcaccaatttagccatcattgacacttaaaatctctctgtaaagcaggatgttttgttgtggtggtcattcaagtaattagatttgattttgagaggatagctaggcaattgaagatattaggtacactcgcttcatccgtgttgcacatgaggaaaatctcctttgtcagaccactccttcccaagttcttagtggaccaaggaagattttaaagcaaaagtggacctggtggattttatctggatcatctctcattggcattaagtaactatattccatttagtccagtgtctggctgtcttttctcagatatcaggatttaacttaattctcctaattgtgaggatcaattcagacctatcagtttccaagaccagacatcgttctgttagatctgcctgctgtccttaatagcaagtacgtgactggcttgaatagccatttaaaagagtaaaaaaatggttttgcagaacagaatgaaatctgtcatcttaagcatttcctggcctgccctctggagtattaataatcctaattatttttaaagcaggatttcgtctattttctggtgttatactgaagattgaattgagctccaagattaggaagcgctaaaccctatcctcaatttctatagccattttctaataaaatctctttgaagataactttccctatccccctaatcaaaaatatcaagcgtagcaaagagatgttaaggaaatcaaacaaccctaactcttccaaatagttccccttagttttgttttaaaaaaatttatttgtatcctagcttgaatattcacattccatttagctaggggttttccatgttacataaaccatttcctatttctacatcttgagaggtattcaaggcaagctctactgcccttgtggagctgaggaaaagctcactgatgggaaaaacctcttgatcagagtcatttggagattctgagaacaaattgtaattaaactgaaggtttcctaatttctcctccattagcccactgactgttttaacaggactaagaagtattaccgttagaattgattttattatgattttggctatgaatttttatgatagagatgggaataaacacaggaaggaaatgttttaccaaagcaataaggttattttacggtggtaagattatagatattttttcctctgttgatctttattctccaaattttcagtaatgggattatattacttttataattttataaattttaactgtcatattttatttaagaaaatgtatattaaaagttaacttttttaatgccttggaatttttttttttttttttagagacagtgtcgtgctctgttacccaggctggagtgcagtggcatgactgtaactcactgcagccttgaactctggcactcaagcattcctcccaccccagcctcctgagtagttgggactacaggcgcacgccactacacctggctaatttttaaattagtttttggtagagacaaagtcttgctatgttgcccaggctggtctcaaactcctggcctaaagcaatcctgctgcctcagcctcccaaagtgttgggattataggcgtgagccactgtgcctggaccagaattataaatgtaaatgattgttctgtcctgtgatagataacttgagagtttaatgggataagtgaggctgtttttccctaaatgccttgcactgctatattttattcattcttcttttttgaatacagtatactttcagaaagttcaaggttcaaaaagtaaaagggggcgtgcgtacatacataaataatctcctttttactcaccccattcttctcagaggcaaccaaaacactcctttctcgtgtatccttccagagatattttatgtacatgtattttttcatacaaaaatgacaatatagtatataccctgtgcttagagagctttccatttagataataaaactcttccttgcattttttaaaatatttcatgaattttacatgcatatttacacacacacacacacacacacacacacacactaatttatctaaccagttcttttttggtggacatttagatttttccagtcttttgctattatagacagtaattcaatgaataactttttacataatattgaatataattttttttcattgataagcaaaactatctgtagataacttcctagatataggcatgtacaatttgtgagtttgatggatagtgccaagttgccctcaattagggtcgtatgctctttgttttcaccttgtagcttcctgtaggtgcctctcttcccctggtgctaggatgtcagctgtcatttatgttgtatccatgctgcctctagctatcttttcttctttatggactctaaatatgttatgaacttagaaacaaataaccaagctgtaggaactatgtctaaagcaagagtgtatgcttcaaagttgtggccagagcattgtaaattattcattcatttgttcaacaagtatttattggatatttattgtgctcactgttctaggcactggggatatagtttctgcccttatggatgctcttattccagtgaaaggagaaagacagtaaaaaaaatacacaaatagactgggcgcagtggctcgtgcctataatcctagtgcttttggaggctgaagcagaaggatttgcttgagaccagcttgggcagcagcaagaccctatctctacaaaaaatttaaaaattaaccaggccttgtgtcatgcacacgtagtcctacctagctactccagaggctgaggtgggaggatcccttgagctcagaagttcgaagttacagtgaactatgatcatgccactgcattccagccagcctgggtaacagagcaaaaccttgtctctaaaatagaataaaataaaataaattgcacaaataagtaacttttgtataaatgaaatgttattgaacttcagttttattttaaagttaaaatcaaatgggatcctacatgtcagtgtcctgcttaattacattatagattagtcttcatttgtagcctacttgctgtaagatggagaagggacaggaaaactcttttatgaagtgataagctgatagagtatggtaacattattaaaaaataagaattgtgaatataaacaatgctaaaaagcacagagcagagtctccagggatctgagttgtggctctaattctaccatgacatgaccacaaataagttacttatgctctttgtactcaattttctcttctattaaatacaggcagtggattagttcagtgtttctcaaagtgtattccatggagcattaccaaattctttcgtgttagtaggtgttacgcaaaaaggagggccacagctaggccagctttatgggaattggaaaagagcccctccagaacacagctcagcaaactcacagcttagcaagaggatgcagcaaggtagagaaagacgccctttcttctggttggtgagtgggggtccgggctggatcttatctcccacactcccaccgcccatgcatcatgtgcagcactcaacagctgccctgtctgtagtaaaatagctttgagaagtggctgggttaagcaggttttcttcggtacaagatgtctcagttttaatatgcaaacatgctgtactttgaatctccaaggaaacaaagtggtgtgtggcatacatcttattggaccttaaaacgtctttttttgtgggactagtgttccttggaacacaagctgagaaaaattgaattagattatctttactagtctttgttattctacaagtccttcttattcgtgttttattctgatacattttcctcctttaataaaaacaaagtccacactaccaccaccataataccatgtcgtctccaaattgctatctatggttaaacattccctttgccccattacgttatcaccaggggctatttttgtgggggagcataccagaacactctccctcaggattacgcaaacctgaacaacattcaagaactttgtttttaagaagtggctgtcactagcgtaacaaaagtcgtattatgttcgaatctatactgatgacacttaataatgttcaaatcaagtgacatgtgtttacttataaatgtatatgtgtaaatagcagatctgatcattgttagtttgtagctaatcataatgtgattttaccattttctccacctcctcctgaatgtgaggtaggggaggaggcctctttcctcttggattcctccttctcatctctcttgaatcatgtagatggcagggttgtgaagaaagaatcagttcacaaactgcagcacaatcactgtcacagagttgagttcttatagcttaaactgttctgtttataagctacaaaagctatggaaagaaattcgttcatatgaatagaaggaatataattaataaatattaaatattatttggtaaaatactaataggtcaatactaatactaatgtgaatggagtggtatcatggaaaagagtgccagccgaaaccattcatttgagctcattcatctgcacctgactatcagctgaatttttctttacatcagaaatggcagcaggctttttaggtttttcatagtttggttggcaagaagtaggacagtagctcttagctcttagttggaacatagtcagtgttcacatataattcatgaaatatttatattaacaaaaaaactttttctcacataaactttatcacctaagaatatctttggcttttgttcctaagtaactttttttttaacatttttaattcgagttgagtttgagagtacaatcctcatgccagtgtggagggtcatttagaacttaggaaatcagtggggatacaatgctctattttgcaaaaatagtaggccatgccagattttgagttctctcaaaaattccctcaccgattattagtggctgattctcaaaaatgagtgcatgtgctcagccttgctgccaaaaatggctgaacgtggtggggatttgttcatgtactcaggcagcagcggtagcgatgtgcaccatatgcctactgctagtaacaactggtgaaggcagcgcctccgacatggttgaaacgagctctgtttttgttttttgtaatttcagtttatgaatactgatgtcagtggctgctgttccatttgtctcactgcttttactttctctgtaaaagatttttttcttcctttcgggcttaagtaccacctgaagagagaagccttttaaggcctgggagactggccagtgccctctgtcgctctgttcacctactaaaaggtagcattgttaacctaattcagcagggccctgactccatataaacactgctcaacagagccagaaagactaattgaattgtacaatacatcatttttcagcaacagtttcaagtgggttgtacttcatttcccaaaacaccatcagtcttttcctcattttaagatatttaaatgtcacaaatatttaatcatgataaataaaatatttaaacccaagtctttctttcccactgaactgtgggctattatacctaaagacagggccatgtttgttttattctccactgaatgcctaatgcctgctacagtatctggcatgtacctgtgtctattaatagatgcctcaaaaataaaagtgaggaataactgttatttccaatctggttagatagttgaagattttggctaattctaggtgcctttttgtgattttcagagactgtaaacttctctaattctgtaactctaactctgcaggatgctataggatcacacaacacaacaggtacctcaaaaataattgcttataaggaaaaaaattagaagtttattttttaaatgatgtatttttttgcattcctataaagaacataaactttggtataagctttgcaatataagaaaatgatcatattgaattttatgtttatgtacgagaaatttataatcaacatataatagccatacatttaattatgacatatacatacagaggggtttttatgtttgtttctgcctgttgtactctattctgtcccacatttgttcaccaagtgaatttctgtttatcttctacacccagatccaagtgccacctgctttgccaaccctctccccaccaggagagttgatttctccttcctctaagctaccagtgggccccatccatacctcttttgtagcagatgacagggtacatgctgcatgttacatgtggttttgttttaaatacttgtctcatactacacagtgagccacttgagggaaggaactgtatcctatatatctttattaatatacttctagcctaccatatgaaacatagatttttttttctttttaataagcaaagttttttgtttattttaatgttgaattctaaccttgctcctagagagattttaatggaaagtttttagagaggttttatcttccataaatagaaactgagccaactttctatgtattagtagccaatctacatctcactgtcagtgattggtatgtagagattctgaaaaattaccctcatgttatgcattatttaagccactccctctgtatctctgagacattgtgtttccatgtactatttgtttctactgatgacaatgacattataaaatgaactttcatagtcttgtggattaccgtggattaccactcgaggtgaatacagaattggatggatatattggctggagttagctgaagttcaaagttgtaataagagcaactcctttctggtcactgaagcagtatatttgagcttgtttgctagtcagtcagattattctgcaaataatatccttttatcctttttgaatgttgtaatatgtacatgatttagtctttttatttgtttgtttgtttgttagatggagtctcgctctgttgcccaggctggagtgcagtggcatgatctgggcacactgcaacccccgccttctgagttcaagcaattctcccgccttaacctcccaagtagctgggattacaggcatgtgccaccacgcctggctaatttctgtatttttagtagagacggggtttcgccatgtcggccaggctggtctcaaattcctgacctcaagtgatctgcccgcctcagcctcccaaagtgctgtgattacaggcatgagccaccacacccggccttgatttacctattttttaagtggctacttttcaaaagtgttatggaatattcatacatatatatgcacatataaatttatgacgtttttaaaaatcagcatttgtgttaaaacagtcttcttaattccttttttattttgaaataattgtggattcacaggaaattgcatagacaattcagagaggttctgtgtacctttcacagtttcctcccttggctacatcttaggcaactaaggtccaatatcaaaaacaaaaacagcaagttgacattggtataataagtcagtataacggcaccatactgtgccgttctgtcacatgtgtaggttcctgtaatcaccactgcagtcaagatacagaattaataaattccttcctagcttacagttgaatgtctggaagagagagaagtcaaaatttacatttaattcaactacagactttttcatttgtctgtattgagaaaataatcgtgttcctttgatatttcagctatggttcctagtttgagcaggtgtggagagccaggtgcttctccaggactgactgacgacgcttgttttgtaggtgtcgaagcaggccaaggagtttctggagtacgtgtacgaagagccgctcatcgacatccagcaggagaacgccatgctgtaccaccacgcagagccgctggccgccgtgctgcggctgcggcagcggctgaagtcgctccgagcctatttgttcagctgccgggcagcggtggcagaggatctccgccgcaggtaagagtcataaatctcagacggctcccgtttgtttttctttcccgcccacggagggtggtgagattatctccaaagggcctttccagcacggaccgcctctaattttgtggctcgccctccgcctctccactgccagcctctctctgggctcatctttttactttttttactccaaggtccccatttggttaagccaagcaaaatgaaaataacattcaccgttactgaaggctttcacccatggatcgagtgcccaggacggtgaaggcttctcttaccaatatgttaatttgagataataatcatggaaatatctatattggtcacttatgtagtattttatacttttcccaatttcaattcctgtttctcatcagcaaaaaataagcatgtttaaaatagttcataactaaaaagcattttcaatgggaaataagtaaatggttattcaaattttattttattttatatatttattatttttttatttttatttttaaagaatagagacagagactcattctgttgcccaggctggtcttaaaaatcctggactcaagcgatcctcctgcctcagcctcccaaagtgttgggattacaggtgtgagccactgtgtgggcctcaaatcttattttctgtacagaaacaaatacccaaacttggtcaatgatgcaggcagtagagctataattaaaatgcacaggcccaggattctgccttttcatcttaccgtgggtgcaggctgctttcccgtaacttagttagctcatagttcatagaacaccaagtccaaagcaggctcagatccttaaagttgaaagtaaaatgtgcctgctctcataaaattccttttttacagacagattttataggcatttaaagtctcacccttggcatatacaaactagcttatacttgaaataattgttgatggcgttcataagtctctaaaaataccttttaatttttttgttttaatagaaatgaccagcagcatgcattagtcatgttaaatgtttttggaggtaagcctacctgcctaagaacttttggaaagtattgaagtgatggagttttgagatccaattagatccaaagaaactgacataaccccgggcatctaaaaaagaactaaatgtagatagtaaaggatatataatatctagacaagctctcataaaataataatgaaaagacagctgccataaagcaaaatacttctcagtggtagtcattctattacctagttgtttttcagaaagcacagaaagtggtcaggatttattcttataaagtctaggcagatcttaattttaaaagatcagggctttccttggaaggcaatagaattatatgtctcaaactaatttaccaactaaaccagatacaagatttttaatgttcaaagtatgttctattattttcagtaccttttggctttgctcagagcttatttttcttgtgcctgtatttctagacaatattaaaatctctacataggaatcatgttagatacctttatggtataatgttttgctctgcttaaaatatgccaaatcagggcacacatttagaagttaaatagaaggtcctctcctcatatggatgactaagaatctctactcaattccagcagtctggtggtttaccaccatgtactgtgccttatggccagaccaccaggaaagaaatgggagttctagaaacaaggcactcccaaagctatgagaatgaagacagcatttttccccttcattttcccttttccctatatttttctttcctggacttgttcataaccattatataatgcaatgcctggcacaaggtaggtgttcagtaagtactgaatggatagatggaaggagggatggatgtatattaagtgtcacttcagaccactgagtaatagctagtagctcagttttggggagggaatcatcttcagagtcttctttttcttaccttcctatttttcacttagcgcaatgtctgacccatccaaaacactcaaaaatagttgttgagtgaataagaaaatgagtgaaagagcagtcaaatcagtccaaaaaatttagatggttctgtttctgagataactctcaaatctttcctctcctttttacttctaatacactaccctggttgagaatctcaaggctattgccgtgtccttctaactagcctaacatttcttccctcttcaatccaacctttgcattagataaattatttaaaatagaagtatagaattcaagatctgcccaagtctaacccagtatattgttctactctcaaataccctgcccttcaggcaaaaattattactttgctctcaaggcattcccttgtgggaattaaatgagttcacacaactgaagtgcttaaaacagtgcttggacatactaagcatacagtaaatactattattgttattaatatcactttcttatcctagactgttcttatatctggctttaaaaatatttgataaaatattccacttaaaagccaccacctgttattttctctactagaattaatcctcttttcctgctgctatgtcaagaaaggagtgagcaagggagagtggatggaaagctagctgggcccaggcctgtagtttctgcttatacagtgcttgcttctccatgtgactgtttcataaaatgggtggagcagtctgcctacaagccaacaatgagacattgattcctacagaaactgaggaagcactgctttactttaaattttgttattttagatttcctatacttacatgttgttaaaatattgtttagggttaccatttctctcaaacctgaggcagagaaaagtgtgctagtaacaaatagtacttttacggcttttgagggaaggggtaagttgaggggggatggtcttgaattttttttaaatcttttttattaaaaaatttaattaaaatgtaattattaaaaaattgtttttctagccactaaacaaccagggatgatttattctgaaatacgactatttagtgaaataatctccaagagttttgccagggtgtccatacttcctgcagccaggccacactttcttttctttttgagacggagttttgctctgtcacccaggctggagtgcagtggcacgatcttggctcactgcaacctctgcctcccaggttccagcaattctcctgcctcagcctcctgggtagctgggattacaggcatgtgccaccacgcctggctaatttttgtatttttagtagagacggggtttcaccatgttggccaggctggtctcgaactcctgacctcaggtgatccgcctgcctcagcctcccaaagtgctgggattataggtgtgagccaccacacccagccagccacacttctttttttttttttttttttttgagacagagtctcactctatcgcccaggctggagtgcagtggcatgatctcggctcactgcagcctctgcctcctgggttcaagcgattctcctgcctcagcctcctgagtggctgggattacaggcctatgccaccacacctggctaatttttgtatttttagtagagacgggctttcaccatgttgcccaggctgaatctgacttcttaaaaacaaagttagtcaccaatacctttatatgtaatgagtttatccaaaatcaatatttaaggctccctttgttttacctgaggatacgacatctaaagtgggggagtttaaacagtgaggtgaacttgctggacttaactaatctcatatatccctgatagaaactgaaagagggaggagttgatggggaacaaaaaaaagcaagagaatccagttcttatctagtcgtaaaaggcattctcttcctgcctggtttttacctcaatatgagagtggccattaatctccagcaagtaggcgcaacatgccgaagacctgtcagcaccatataaacagaataaagcaaactgttaatattgctgtcgtgagaaaactgaaaacagactgattaattgtattagcgctcgaccgccagggagccagctttggccgtcgccttattagggaagtcatagtttgcttttaggcctttcattatgatggctgtccggtattcatcctcactgtttttgttattgttgttaaatgaacgccttgttcttgaacccacactgcacatcttgactggcaggggtgattagtttagaaaaagtcagtgtcctccccgaagcttaaaatgtttacagtgctgacaattcactgtttctgaggactcccagatggcggtcctgctgaattagttcaaggtctagttaacttttcatgagaagaattatttacagtgtccacacatgaaggtgcatgaagaactctgtggaaaatctgggcatacatggcaatgtcaggacacatccggatcagcagctgttagggaaatttctgggagggacgttaagaactgctaggaagagcctcagctcttgctgaacacaggaacagcaggatgtgtcacacacaggcacggtagaatgtgtcacctcaaggccagatttggccagcagacatgttttgtttggcctcacagggatggccccacaaagttttgaaattgtgaaatagttgccaactttaaaaaaatcaggagttttcatgcacacacaaagtgaagctttctggtttctcttgggaaatgagttctgattacacagaacttccctcattctgtgtagcagagatcagctttagacacttgacttgccactttgccataacttcttctgctctagtttgtctccccaaacccagtgccacttggcatataacacattgctgccctgtttttctcatctccagcccatttaattcgtttatggtggttccctgggcctaggcattcgaggttttaaccccaaggccatgtaattaaatattaagaacagagtttgtcgatgtctcagatactagatccgtaactcggtcaggaagttcatctcaaaggatgccgaatgtctagatgtggttctctcaaaagacagacatgaagagtcttgtagaactagaggaaataacaccaggtcgacttcaaagttcctcagaagatgtgttggggtgtcctaaggcttgggctaggccattacaatgcgcccctcaggcagttgcggtacagtgatttgagggagggaccattacctggagcagcagcctcaccacaaagctgaagattagagctgggttaccaagcccaggtggggcaaactgagaaaaaagaaaaaagtgaggacacaaatggaggtggtttattataaactctgcgttaagttggacggcctgagctcagagctcatttctgtctctgttagctttcagagccagttttctcacctggagacaataccacctcataaggaaagtgcgaggattcagggatttaatgcccagaacagagcaagctctcaggaaatattagctgctataacttttattttaagcagatcataattcaggaggagccaggaggtgaacaggggagaagaggcaaaaggaagatgagcctggaggcatccaagagcctgggattcagggaattgccacacctttctgtgcagagcacacaggatcagtagaagttatgagatgcggactctggcccatcagtagcgatctacccggatccctcagggaccatgccccttaatcctccctccctgcttctagcatatttaattaatgtcatactctctaatttttttacctgccctctcactaaaaaaaaaaaacaaaaaacaaaaaaacaaccctgttcatactaccacctaagatcccatcttaagcactcagaactgtctccatttcccttttgcccactcacttctgacgtggccccttgcaggctggctgtggattgcactctcctctgacaccttgacttcctgaggcccttgtttctttggcctcctgggcattgttggtcaccatttctcctagacctccttctccctgtccttctctgcactctgtcctgtccgagtctcccccttctccttgccctcaatgcctccacatcctccagctccctaatgctaggaatacccaacacctcggctgcccttctgcataatcctccagccttcacaggagccaatggggcaactttatgtgagctagcagaaggtgcccctttctcagggcacttggttttgttgttgttgttgttttgtttgtttgttttggtttggttttgagacagagtctctctctgtcacccaggttggagtgcagtggcgcgatctcagctcactgcaacctccacctcccaggttcaagcaattctcctgcctcagcctcctgaatagctgggaattacaggcatgtgccaccacacctggctaatttttgtatttttagtagagacaggtttcaccatgttggccaggctggtcttgaactcctgacctcaagtgatccacctgcctcggcgtccccaagtgctgggattacaggcatgagctgccacacctggccttatcagggcactttgttgtcatctgcagggagagagtcatggtccctctgtaaatcgacactgactataaggtgacaacgtttggcccagcactcttccttgaggagatcactcactagtttgttatgtccagctgcgtactggacatccccacttcaaattgaaattattttttccctgaaaaatatatccatgtgggccaggcgcagcagctcacacttgtaatcccagcactttgggaggccgaggtgggcagatcacctgaggccaggagttcaagaccagcctcgccaacatggtgaaacctgtctctactaaaaatacaaaaattagcagggcatggtggcatgcacctgtagtcctagctactcgggaggctgaggcagaatcgctcgaacctgggaggcggaggttgcaatgagctcagattgcgccactgcactccagcctgggaggcagagcaagactccgcctcagaaaaaaaaaaaaaaaaaaaaaaaaatatatatatatatatatatgtgtgtgtgtgtgtgtgtgtgtgtgtgtgtgcgtgcgtgtgtatgtatgtatatgtatgtatatatatccatgtggtcaggtatgtttcagttaatcatgacattattcccttattttcccctagtttgaaccttgacatagtccaaaagttttgctttaaggttctctaagagccaaattcttcccttatttttcattcccattgccatcccccttgtctctactctcatcaccttatttcaataattttcttttcttttatgagcgtgtgtgtgtgtgagacagagtttcgctcttgtcacccaggctggagtgcaatggtgccatctcggctcaccgcaacctccacctccctggttcaagcgatcctcctgcctcagcctcccgagtagctggggttacaggcatgtgccaccatgcccagctaattttgtgttttttgtagagacagggtttctccatgtttgtcaggctggtcttgaactcccgacctcaggtgatcctcctgcctccgcctcccaaagtactgggattacaggcatgagccaccgcacctagctattttaataattttcttttttttcattttaatacttttctagctggggatcctacctccccatggcacccctcctcagtccctctaacatatgtactactgtaaaatggtcttattagacagtgagtagttcggctacctacaggataacgcaacacccttggatgggttttcaaggttctctgtcatctgaccctgacctacatgcacaactttaacttccacatggttcctgtgtggaccacaccacgagccagaatcttccactgtgttcctgatggaccacagccaccccagcccagccaaaatgacatactcatttccttgacaccagctgcctcccagtcctcttgactcgacttgacttggcttctcttactttaaagccaactcaagtgctgcctcttcccacctgtcctcagtagctgatcccttctctggtttcttccagcagtgatcatctggaccacgcatttggcacttaagggcttggatggtcttctttttttttttttgagacggagtctctctctgttgcccaggctggagtgcagtggcacgatctctgctcactgcgagttctgcctcccgggttcacaccattctcctgcctcagcctcccgagtaactgggactacaggcgcccgccaccacgcccagctaattttttgtatttttagtagagacaggttttcaccgtgttagccaggatggtctcgatctcctgacctcgtgatccgcccgcctcggcctcccaaagtgctgggattacaggcgtgagccaccgcgcctggccagggcttggatggttttcatctccttatgtatatatcctctcttgctggctagatcagaaggcccttaaaggccatgattgtcctcaaaacctaaaatagaagaccacacatgctagtggtgcaataaaagcttgttaataatagtaattatgtgtagaatagtttactgtatataaagataattatgatttcattagtcacaaagtacttccccttaaatatattatttgttctttacagcagcccttttagataggtagggcagatggtatttagaaagaagagaaagcatcactaaacatcagggaaatgcaaatcaaaaccacaaggagatatcatctcaccccagttagaatggctattatcaaaaagatagaaaataacaaccaccagcaaggatgtggagaaaagagaactcttataaactgttggtgggaatgtaaattagtacagactctatggaaaagagcatggagcttcctcaaaaaactaaaaatagagctaccatatgatccagcaatcctactactgggtgtatagccaaaagaaaggaaatcattatgtcaaatggatatctgctccccttatttatggagatcccactagtcactgtggaagtgtccatcaaatggacaaagaaaatgtggtaaatatacacaatgaagtaccattcagccataaaaaagagtgaaatcctgtcattcacagcaatatggatgagcctatacaatgttatgttaagtgaataagccaagcacagagagacaaatactccatgttctcattcatatgcaggaactgaaaaagtggatcacatagaagtagagagtagaacaatggtcactagaggtggggaagggtagagggatgagagggttagggagaggttgggttaacaaatacaaattacagttagagaaataggttctggcattctatagcactgtagggtgaatatagttaataataatttgttgtatattttcagatagctagaaaagtgcattttgaatgttcccaccataaagaaatgataaatgtttgagatgatagatgtgctaattaccctgatttgattattatacattgtataatgtactgaactagtacattgtactctatcaatacatatcattatatgtccattaaaaatatttaataataatttttttaaaagaagagaggccgggtgcagtggctcacgcctgtaatcccagcactttgggaggctgaggcaggcagattgcgaggtcaagagattgagaacatcctggccaacatggtgaaaccccgtctctgcgaaaaatacaaaaattagctgggtgtggtagcgtgcacctgtagtcccagctactcaagaggctgaggcaggagaatcacttgaacccaggaggcggaacttgcagtgagccaagatagtgccactgcactccagcctggcaacagagcgagacaacatcaaaaaaagtaggaaggaagggagggaaggagggagggagggaaggaatggaactatgactctaagatgctacactctgagagtgtaaaggaaggcagggaggtggcagacagtggtgtcccttgaacagggaggcggattgctgagacgggcactcctgtgctcgttggcaagcttgatcagccgtggagaaccaggcatgacaattgggttagtgctagcaaatgcatttactccaggtcagcatttgccagaccctcctatgtcccagacctgtaaacttaaaacaaaaatacgaagttaactatagggttgccttgtaaatatctttagccaaaacagaaataaaaacattaccctctatttctcaccatcatttcacgtaagaacatagtaatactaaaaaaaaaaaaaaaataggcaaactgctttagaaatcaaacagctttttaaaatcaagtagatttagaaatcattctacattttttttctctcattttactttggactgctaaaaacatcagcagactgacaccagctgtttggactagcttttcagaaatcccagttcaagtcatattttctcttctgagtgctgaagtgaaatccactcctgggaaatttctgtggatgcttcagtatttcccattctcaatcatcaaaaatgtgatttgggggcttggggtgcctggcaaatccatagcccattacggtataaatgtaaaactcgtctctctccagcactagtcaagggcagtaggcaatattaggcctctttccctggttgcttagaacagaattgtgttctcagggagcatttgctcctacatgtttgtcaggtttagtccttgacttagaccattccgaagcaatttaatggcttggcttgagaggctcaagagaatacccaaagtgattcttctaccttctaagccatctcttcctatctttggtgtcacattttatttcaaattatgattatatccagcaggagttcccactgaaatatcagttttaccgaatggtgagaaatttctattataaagattgccacttttattaaaactgtcctggtgaataccagaaaaaaatgtgtgtgtgcgtgtgtgtgtgtgtctgtcctgacagactctcattgcttccccttccttcaagcaaaatttagcagcttactctgctcttagaccagtccccatcaatgtcacttgatttaacaagactgccttccccctccttcccttgttatgccagaaaataactatctttctagtgagttcactgtagctgaggctgagtccaaaggttgaaatgttctttggctgtctaataacgtcttaaccttaatatgtccaaaacttagctcctagtattcccacccacgcccactcacattgcaaaccactcctcctacagtatttcccatcttgcttcatggcatctctgtccatacagtgatgcaagccaaacacctttctctcatattctacatccagtcggcaaacctgtcagcttcagcttcaaaatctatccacttttcaccactttcactgctggaggttgggtccaccatcacctttcgcctggattattccagtaactggtctcctgcaccacccttatcccccttcagtctgttcttaagactatagctaatgtataaattagatgatgtcactcctggcccaaacggatagtttcacctctcgctccaagtaaaagcccagggcatacgtggtctcatctcccattacctctctgcctcatcgcccactactttccccctcattcactctgttccagtcacactggcctttttgttggtccttggtcataccaagctggctgctaccttagtttctatacttgcttttcctttccctctgtaactgctgagattgcttccttttttctctttttttcttttttttatcgttttgtttctcagtgtgaaaccaagcttgcttcgtaactccattaggtctttgagcagccatcacttaatgaagcatcctttaccactgtgttttaaatggcaacacagtgtctgtttgtaccccactgcccaccacacacgcctcctgtcttctttctctgcttacttattaccattaaacatggtattttattttgtctgtttccatctcttaggccatcaggtgtgaatgtagacgttttgctttgttcaacctatgcagccacatgcactggcgctgccctttctgctagatgtaagctacaaaatgtcatgactttttatctgttatattcactgcttagagctatacatatagtgggggctaataaatacttgttgaataaattaattaaatgaatgaagattctgcccaatttggccaaacttattttttctcttattacaaaagaatactgttcatcatagaaaacaaaaataagaaagccacccatatcctaccactttgatgcatatcctcccagaccttttcctctgcagatgatctttccccatgagagtggttttttgtttgtttgtttgtttgtttgttttttgtttgtttgtttgtttgttgagacagagtcttgctttgccacccaggctgcagcacagtggcgcaatctcggctcactgcaagctccgcctcccaggttcatgccattctcctgcctcagcctcctgagtaactgggactacaggcgcccaccaccacgtccagctaattttttgtatttttagtagagacggggtttcaccgtgttagccaggaaggtcttgatctcctgacctcgtgatccacccacctcagcctcccaaagtgctgggattacaggtgtgagccaccacgcccggcactgaaagtggttttatattatccttaaccatttcacttagtatattgtgaacatcttttttatgctggtaaatatttgtctaaacataatgaaatgagtgaaaatggtgttttaatgtgtgggcatacctacatgttattgatcttggaagaagtaaatggggattattattcagtgtactcaaaagattgcatgagcaatctaatactaaatgagctggtagaatcacttcatatcaacactccctcttctcccctcaccccctaaaaaatcaagtatattaggtagaaggattatctaatacagagagaaaagattgcatgctattgtaaatcaaatacacttgctctaggagggcagtttattaagaacatgtctcttagggcagaatttttttttctttttgagacaaggtatcactgttgctcagtgccatgacatgaccacagctcactgcagcctcgacctcccaagctcaaacaatcctacttcagcctcctgagtagctgggactacagctgcatgccatcatgcccacttaatttttttattttttgtttttgtagagacagagtctcactatgttgctagggctcctctcaaactcctgggtttaagggatcctctacctcagcctcccaaagtgctgggattacaagcgtgagccaccctgcctggccagggcagcctaactcttaaagcacaatctacacagactggagttgcaatgtctctgaactgcatatgaggaatatcttacaaccaaaatctgagactgaagtgtgcaaggtctggttaatactgaattttagaagaataagtctattttagcaaaaatattagcactaaattagtctcattaaagaccagtaagtattagctcttcaaacttgtggataacacttctttaagctcactaagtgaaaacaactctttatgttctctgtaatatttaaggttacccgaattttgtggctacttttccagttagctaattaaaaatttcatcagctgcagctggggctttagccttaacagattagctgcagaatctatcaggactcagaaataaaggatgtcattttggtagttttgatagcaaccattctcctcattctacttcaagaattcttttccattagatgacttctaaaagtgtggtttttgagtcatctatcttcctgatatcctaatagctcttccctctcccttctttttctccagagatctaattcagcaaattatgtatataccaatatcagcactgtaaaagggtgctacagactgtctgcagtgtcattcatgactaaacagatttgaaaagtttcaaaaggaattctgggaagttatatattaattttactaaactacatacatacatagctctttatttactcagagatctttcaaaaagccaggatgttttctcttattctgagatgaaatgaaatatataaattctctaaaatcattttctttttttttctttttttgagatgaagtctcactctgtcacctgggctggagtgcagtggtgcagtcttggctcactgcaacctccgcctcctgggttcaagtgattttcctgtttcagcattcctagcagctgggattacaggtgtgagccaccatacccagctaatttttttcttttgtatttttagaagagatggagtttcaaccatgttggccagagtggtctcgaactcctgacctcaggtgatctatctacctcggcctcccaaagtgctgggattacagatgtgagccaccgtgcccggcctctaaaatcattttctaagagaaaacaaaaataaaactcattgcgggggaagtgttatattcttgcgactgttaaacaccttaagaatttgagctaggtatataacagctatgatataatctatcatttttataatcagatgccacaatactcacaattaaaattacatcccagatatttctacttgaggctttagattgtggctaagaaacttaagtacaatttctgaataagcaggtaaaaggacccttatttcctgtaactacctgccaagatataatatctgatgcaatcttgccattttttcagccaatgagatttgcaaaatgaggtacctagagaagtgattgaagcttgtttcttccacatgggctgctatcgaaatatgtgcctttgatttaaaattgtttttccattagctcagagtatggctggacatacgaatcctgtccacgtccagcctaatgtaactatttcaggaagagtttgcagctcatatcaagaacatcaaattgcatctccctggggatgcttcatagtgctttttgctgatttcagtgtgggtatatgtgctctccaaaggaaagacactggccatctcaacttaatataaattacctaccctggagcacatattcttggaagacagtaaaactacgtgaataaatggttttcctttcaaaattattccttatgcatctttatccgtattctttatttagacccttatcatttagaatcaaattgtggagtttgcttttggtgttgtgctatcattttaattttacatgtgtgtatgttgtgggtcttttctttaaagcctaagatgagatatttccattgcaagtttttccctcattttaatcattgagtctttaaatgccggttgtgcatctctaagaactgagcttcaggaaaatggtaatattatcaaatctatcagaaccttgcaaagggtctgcctactttagagcctgaccccaatcccttttttctcgtgagcactggggcttggtgggagctgagttgaacttctcaggaattagtcaagttaaataagtcttgatttatttgacctaatgtcatggaacaaaatggaatgaggcccttctacctttttgttaagactactgcctttgatttcataggcaattatctctgcatttttaaccccaagtaccagctacataatataagggctctgaatcatatatgacctttttcctttttaattttcatcttttctcacctttctcattagagcaatctataaatgaagcctaagttaccttcccagtgtgtcaggcaattctaaagatgataaaatagaaaatgttagcactagaagcgattgtgctagttggttttcatgatcttctagcacgtttcttcaatgttctttgctaccaggaaactcggtagtgctacctgctagtgatatcgtttcctttgatgggcgagtgaagtgtggagttgactcttcttatctcatttattctttggctctggtgtcagggcttgcattggcataagcagggctgcccactgcagaaatgctgccagacatgatgattaatagcccctgcaatacagtgacgtcagttaatgcacagaaggccctaaacacagcagcctcttctgcaacaaggatcctgtttaccaaaggactgctaagccagataaccttcagttagtttgtggcttttggttcttaatataatgaagtttaggggttaaatttaataaattagtaattacttttttttttttttttttgacacagggtcttgctttatcacccaggctggactacagtggcatgatcatggctcactgcagcctcaacctcctgggctcaattgatcctcctgctgcagcctcttgagtaattgggaccacaggcattcaccaccacccccagctaatttattttatattttgttttttgtttttttttttgagacggagtttcattcttattgcccaggctggagtgcaatggcgcgatgttggctcactgcaacctccagctcctgggttcaatcaattctcctgcctcagcctcctgagtagctgggatcacgggcatgcgccaccatgcccagctaatttttttatatttttagtagagatggggtttcttcatgttggtcaggctggtctcaaactcctaccctctggtgatcagcccgacttggcctcccgaagtgctgggattacaggcgtgagccacggcacccggccccccagctaatttttgtattttttttagagatagggtcttgctatgttgcccagtctggtcccaaactcctgagctcaagtgatcctcccacctcaccctcccaaagtgctgggattacaggtgtgagccactgcgccctgttgagtaattattaatcttttttatataacactttagtaaaaacttgaactgtttcaattaggaaaatactgtgtgtggggtgtgtgtgtgcgcgtgtgcgcacgcacacgcgcggtcaggggagtgtgtgtgtgtgtgttttcatgcacgcacatacacatgtgcaaatgtgtgtatttgaaagagcttccagctgggtccacatcccatttcctttaggccttttgaaggccaggcttcatcagttatctctacttttgtgtcttcagcttttgtttctatagtagcttcttaatgttagcatttaagtatgcccaagtttctcttatgtttttagaaaaaaaaaaatcctttcttagtcctacatccttctttagctgtggcccaatttccctccttttctttaaagttgacttcgtaaaagagtaacccacaatcctcacccctctccagtctttcctcctcctcccctgaaaccacccagtctgaggtcactgatggattcctgtttgccagcaggcactttccaggcctcatgagagtcttccttacgttatttgacctctccactacctttgatgccattgaccaccttcttccttcatgaaattctctccttccttggcttccctggtgctggctcttctgctttttctcctccctgtcaacctactccttcccagtcctctttctgtttatctactcctaaatattaatagtactgtttcaccaggaagcaatcttttctcatttcccagcatgtgcccccctggactatcactttttctcatggcttcatctaaaacctgtaagctgggggcccacaaatcgcccacttggactcacaggtgactccacttgagcattccaaagacagttccaaccgtctgccccaacatctgagctaccctttcccccaccaagacaactcctcttccttagtcctgtttttcagacccctttgtactaatcagagtttaaggcaaactggctcctgggaatctttacttttcccattcatttcctaaaggactcctgtcaggcccacttgtaggacctcagccacagcagaggaaagcccttggaatcacccagatgggaagctgccggggcccacactttcctgagcttggcttttaggtccatatttaccctgagtttccctgtgtttggtcttcctaaagaaaatatttagagaatgtcttgcaaattcagtctgccttaggggaaagaggaataaatggcagtgtgcgtaagttatctggccctgccttggaaacccttacctctaagcagaagagtgagtccctatttctaaatagctgcaaaaaaatctttttcttattttatttacattaaaaagcattactataagagatacattttaatacctaccagtcttccctctcaggaaatttattcccatatttgacttcagtgctttcatactacaactcccatcctccagggagaaaaaaaggtgattggcattatctctcttaaaagtctttatttgtaatggccaccactaaatctcttggacacaacatcttctccagttctccagacacaataagctgggttccttcatctttcccgcatatattgcattttccagttctttgtgtctgttatgactgacctcatgtaaattatagtattagacactgaagtgtgatggagaagacagtagaggaagtgcttctggaggggcttagaatctcatataaaaggagagagaaaataaacatatgtgaaatatatatacacatagaaacattaaataaatacatagccactttagctgtgctgtacaaataatgttgaaggaatattagagatgattgtgaccaaagttggttaatttttgtgagaagaataatgaatagtgtttggaagcaagaaggaccctgcctagtaaggagaaattggaaattctctttgttgctcatcagttgtattcattgaagtatctatctccagcacgtagcacgatgccttattttagacactcagtaagtgcttgttgactatgtgataactgactggttatagtactccaggaagagtatgccagtgtgatttggtttgtaaatttgtaaataagtctgatatcctgtatatccctaatcataaaagttttagaattttaaagcagaaaggacttttaagtagcaaaacattacagatatgctctcctgcatttgtccctgccgtaaatcatttcatcttccttttaactctttctccagctgacctatgtttctacaaaccagcagaagaggcaggagctagtcttgaaatgattttgcagcccgcttactggactccatttcttagcactgctgccacattgctttcattttactttatttaagggatttcattattaagcatttacctttcagtaagattattccttcagtttagtcacccctaaacatcctctgtctctcatattatcatacactgctccctttaagtcccactgaaagactgccctagttttcctttcctgcagataagtttgggcccttggatcttggaacagcaaaaggacattagtgaaaccactggtgaaacctgaataaagtctataatttgcataatgtcgatttcttatttttgatcaatatgccatggttatgtaagatgtaagcattaggggaagctggataaagggtatgaaggtaaggacattttacaaatacagagaaatgttaggaactgtggaagtacatgtgaacattctggttattttcaaaaacatagttttcaaaatataatgagaaaattgcagactaccaaagtacacttttagatagttctagattgtaggtaaacaaagtaaaaacaaacaaccctcatctgggttcagcccccttcccattcaggtttttcctcactccattccctccattcccatggcttcagctgtctgctctgtgctcccatcagaagtgccctgggtcttctacatctcaggcccaggtccatgcttgctgttccccacacaggcactggatattcagcacataggaagctcaattttttattccctcccctggaagcctgccctcagttggccaatggcatcaccattctcatccccaggctctatacttcagggtcatcttagagtcccttctcctttttcacttattcccaatgttctcaattcttccaaaaagtctctggtatctacccactcattcctttcactgtccgcttgtctgccctagaacagactctcacatgccttgtcacctgtctgtagtctctccaccctccctgctgccttcagaggcacatcagtgtggcgttcctgcttcaaaaagcatcagtggctctatactgctaccggcctaaactacagtaataaacatccatccagaagagacatgcatgatattactaaattagatgatcagctcaaacctacctccctcctttccctacccccagccccaagaaattagaaggagcataggcctttggagtcagaaagtcctggccttgaaactcagctctgtgaccttgggcaaattggtctttgcctctgtgcctcagtttcctcttatgtaaaatgaagtttgtgtttaccatccagggctattgtgaggattagataaaatgatgtatctccagtgccaagctcagtgacctcctgtaggctgccttgaggaagaggtcccttgatcatttgtgtcatgtgcttgtgttattgaaaatggaggttgattacatctcatggtccctccagggaccatggtctaccttccacgacaggggccttcctgtagagaagctaatcctacatggaggaattgagtacttttcctatgccctgcccagctgtgctggacctgtgctctgcttcctgtcgcaagtgcagccctgaaccattagagttgaagggagcccagctgtaggaactgcattcagtttcccagaatataatgcccttgtcactcatctcattcctgtgggtgaaacagtgctttccagcagaattcttcagcgactttcctactttccgggagaggtccttactagaatacacctactccagtcctccatctggtcaggacttcatttaattgattcagtgctccattttcagtagtctaatagtgtctgatatgcaatgtgtgcttaatcaatattggatggatggaaggatgaatgatttaatatctaggatttggcaactaatgcatacttaattgaaagactgaataatgattttcccagtgagcaagattattaggccagtggttctaaaccttggctgtgctaatcaccaagagagtttttgttttgttttctttaatactgatttatgggctctacccaggcatataccctgtggttttctaaaagctctccaagtgattctaatagacagccagggttggaatccaccatgttagactactcaaaaaatatgtaccccatgcataactctttatcattttcaattaccacattgtattgtatttatcagcttatgtgtctttccctcacttgactttatgctccttggcctcatacttgggctgtcttcctagtgcctggcatagtgcttggcatataatgaatagtcataaatgtgaattggataaattggtggtttctttcatttaagacacaagaaaattgcatagtaccaaataagacaaagagaaaaatgttagtatcatggattttgttttgggtttagtttgtgtgtgtgttgttttccagtcatctacactttggtaacctgtttgcttacccataacggattatttttgtctgttcattcattgtcatctatccagatgctgtgaacggacagcagctaaagatactggactttgttgaagagtcctaatttaaaatatcttgtcccattattctcatttgtacagaggttctaaaattgccatcactgtacatatgagaggatagttcattaatatgatattcagtatcactcctcctcattaatgaaagccgtagaagcctctagacacgagtggccactccagtttttctgaaatccaagatcaatatatttagatatagaaaaatacagctagaaagatatttggagacatcacattaaaccaccctcattctgctgtgaagaagctgaagccaggtgggcatgtggggacttgccagagatcacacagcttattacggacacagctggtacaagaaaactgatgttctggtcctcagacctgggccaccacgcagtgcttatagcacttaagattacattagaagtcaaagatcaaacttttacctccattctggtgtctgtgttgggaagaaaaatatctgagaaaaagatattacaggttcctcagagggcttaggagaagtataggtggaaagtggacagggcagaggaaaggaattcttgaatgagactgaaacttatcagaaaaatgtgtgttatggcagcaccacagttcacttgtctatctgcccttgttttcagaattttccccagagaatacctccttcaacagatccacctgtattcacttgccgacctgcagcaggtaagtgctcagaggggctgtttcatttttgttgctttcctggagaagtctctttgttgactttggtctttgcaccgtattctgccatcattggggtagttttcatcagaaaccctgataattctttttcagaatggggggaaaacttagtataaaaagatatatgggacaataacaaatgttggcaaggatgcagagaaactggggctcttatacattgctgatgggatgcaaagtacgttagccactttggaacagttaaaaagttaaacatagagttaccatatgacccaacaattttactcctaggtatatacccaagagagttgaaaacatatgtccatagaaaaacctgtacacaaatgttcagagcagcattattcataatagcaaaaaagtggaaacaacccaaatgttcatcagctaatgaatggatgaacaaaatgtgttgtagccatataataaaatattattctgccatagaaagaagtgaagtactgatgcatgctacaatatggataaatcttgaaaacactatgctaagtaaaagaagccaaacagaaaagaatacatactgtatgcttctatttacatgaaatgtttagaataggcaaatccatcgtgacagaaagtacgttagtgattgccagggcctggggagagcgaagaaatgaggagtgcctgctcatggataaagagtttctttggaggcttaatgaaagtgttctggaattaaacagcagtgatggttatacagtcttgtgaatattctgaaaaccactaaattgtttactttaaaagagtaaattttatggtgtgtgaattttcccaattaaaaatttgtatgaaaagatgtaaaaggcattgaatgtgttaagcccttgacttgtgctcaagccagaaagttgaatggcttttaaagtttagtaaaacataacagagcatgtaagagttgaaatcatccttttatacttttattagaacatgtacttttttttttcctttcgtttgtgagacagagtcttgctctgtcgcccaggctggagtgcagtggcatggtcttggctcgctgcaccctctgcctcccgggttcaagcgattctcctgcctcagcctcccgagtagctgggattacaggcatgtgccaccatgcccagctaatttttgtatttttagtagagatggggtttcaccatgttggccaggctggtctcgaactcctgacctcaagtgatccgcccaccttggcctcctaaagtgctggtattacagacgtgagctaccacgcctggccacacttgtacttttaatgattaaccagattagcagctaggaagaaactggccttttgtgtattcagccctaaattctaaatatgttaagctttggttaatcatttaaatcaacaactcactcctgagaagctgttggacactagataatgattctttcaagagttcattaaataataataataattgtgacaactttcagagtatctcaaactgctgtgattctgttctttcgttgttgttttcctctctggttgttttatccagaagaatttaggtcaacttaaaaaccatgctcatatccttcagtcatttttctgactttaaattacttttcaaggattttttgtgtcttttagtttaataacttaagacttttgtgttctttttgtccccccagagctaggaaagttatttatttatttatttatttatttgacagtctcgctctgttgcccaggcagtagtacaggggtgtgatcttggctcactgcaacctcagcctcctgagttcaagcaattctcatgcctcagcctcccgtgtagctgggatgacaagcatgtaccaccagccctgtctaatttttgcatttttactagagacggggtttcaccgtgttggccaggctggtttcaaacttctgacctcaagtgatccgcctgcctcagcctcccaaagagctgggattacaggtgtgagcctctgctccctgccagaaagttattttaaattaaatggcagacatgatgttagagcatttagttggagaagtctaagaaaagactaaggttttcatttccatttatgtgtcaagttgaaacctatttgcacatatcagctctcccaactcctttggtcctgcctgacctttactacatagtcaagcagcagtggtctgctggctagggtggaaaggggtatatttttacttaaaattgttgttcaaggggaggaattggttaaaacacttgttatacatttatctattttctgaagtctacctgatcgtagtgcctgaggacacagactctatcatttgagaagtatgtttaaaggcactgaacattcttgtaaagatggtttaaagtacaatgggtgggctccaaagtgagtactctttgagggagcctttcaaacgtgagttttgatatctgatgaagagaaagaatcagagtaattccatattcattttagggtgtcaaagtaatgtatccatttggaatcatacagcctgctttttaaggctttcctataccctgctgtctttctctccacccccttttctttttttcctcctttaataatcaaaccatacatgccaagcagcttacttaaatcagtggcaggggtattcttggtggccaggccattagcccctggagccccataagcagcttaatcagttttcagtgatggaggcaatcaacagcttatcaaacaccctgtgggtggggcagctagagctcaatgcatccattcacttaacagctcactctaacctggttctttgtgcctggctttaagagccccaaacttatcatatttaaaggaagtttaattcgattactttttctgcctgaggtgggttaaattggatttagcttttgatctgtctgcatcttggctatcagcactgaagggcatccccagcttcatctttccttggtttctaagtaaataacaagcatgttttctagatctgaattgttcttgcaaatatgtaatggaaaggacacaaggagaaagaacaaaaaatagcattgctttgtgaaagggcatgtggtggtatcgggaaaccctacctaactgacccaaccaccagccttatggcgtcctgggcctttttggcctcttctggactgcttcatcatcctgcttcttgtcagtttcaggcgttttagagtaaattattttccctgtttgatttttctcctcactgctaaaggtttctgtaaaagcagacctgtctgtcatatcgagtaactagagaaaaggggcttttaatgttcagattttgcaggggaaaggaaaataaactaaagcaagtgactcaagagttataaatcagaaaaaacaataatgcagatattcttcttaaatgcacaggttcctgtctacacatttctcttaagttaatttgatttttcccattagctcttatttaaaaagcaaaacagacattttcctcttcaaaaagaaaaaaaataggtaagaatttaataaacatggtgaaaggagatttataatttagagacaattttaaaataatatagtacacaaagcactaataatacttaaaaatgctgaaagaattctggtaccaaaaaaattgcaatcttattgtcctctgtctggttttatgtttataagtaacaatgcctaaaattttagcagatagactcaatttaacaatttggctgaagatttcaagctaccttaccgctgcttttgttacattcaagacagttttcccccttctcattatttgaattactgtcctctttgcatgcattttcccttacatttagatgtgaggaaagaaatagcaaggattgacaattgctttacaaaggagattccctccagttgttctgggaacgactgtctcctgctcactgttcactgagtaccagttattggcaaaattaatactcagactgagtccctaattgtctgtttgtttgaccagtgattgaattgctcactggtatgacttgcacattgaaaaagtagtagttgaatatagtcattatctgactacatacagtcagttggtagcgtttagccataacgtgtaaaatggagccaagtaaacctggcctagtagcagggccaaggaagaagcataagacacaggcagaggctctccagatcctaggagctccagggagcatggccttcctttactcatttcttgtgtttagaattccaggtgaatttctgttctgcaaactagatattgttagaaaaacatattcaatccaaactctttgaatataactttaacagaaggtactgctcatttttaaaaaaataaaatcttacaaactttctttgaggaggtatgaatgcatggtggcttttgaagtgaccaagtacttccttataaaggaagtagcaggcaacaactcagcgtgtgtggatgcatggactagtattggtgcacgttttgaatggggaaactgaggcactgctttttaagagcttttccttggttagctactttgagaaggataaatagaatagaatttgtgttttgttattttcagtctatccagcattatcacaaatccatgagaaggctttaagacaggaatgcaataaaaatatatgctcacctgagatggcaagacttgtaccgtaactctcaatgccttaacttttggcgtcagctatctgctttccctgttaagtatgtgacaaaccatctccttactcacatccccttggcacttttaacactaatgaaaaggttccagattttaccagtagaatacattagtacatataaataaatggtcaagagttcttagttgttcttaaggagcaaatcagaactctggtttaatatgtcagtctttggactgtgtaaatgataggagaattcttctaaagttccttctacttgctgaaagaaaaggtcagattttacttttaaattttggctacctgtgctcttgtgacaaaacctaaaatgtatattaatgactaactcttctggtattactcacctttgggggcatatgtaagttaagcattgaatgattctatttgtggcgattcatgagaaaggatactggatgatcccatgggtgaggtggctggttagagtaggccctccccgctactccctccactgcccaccacctcacccccgcacacacacacccctcttgtgagacaatctaaggagctaattttctcattattttccttccctgggccctaaatttccaaatgagaccctacctttaggtgagggcagtttagattctagtttataggaaatatattacccaagaaaaataaattattattttggcagaaattcatttgaaaacatggcatggtattgggggcggggagacatttccacagataagttttaatgaaagaaaaaggacaggaaagtctggaatttggagtacttactaaagagttgtgaagtgggaaggatgccaggtgggaggacccacagcactcaagagccatgaaaagagagaggagtgaccagatgtacactacctttctggaattgcctagcactgcctaaaccgtttgttttatactaaagcaatacacacttacactaagcaactaatgtaacttatgcaacatagaaatgttcagtggatggatggatggatggatggatgggtgggtggatgggtgggtgggtggatgggtgggtgggtggatgggtgacagggtgtatatgtacatatgttcatacatatactatcgtgaactcactggttctctctcccttgaaaagcaaagcaaactgattaacattagccgctaaacaaaacaaaattagaaaagctggcgatgaaataacaatgcacagaattctaaaaccaaataaaaatctctgcttatgtcagaataatggggagttgtttagtgttgtaaacttcccgaacactccatatcctgaacagttaactcttcagttaacttttttgctagtccagcatacccacagagcttaggaattgtcatccgtgtgacctcagcatttgttggaattggcccctaaagaagtaattcaaacagtggtcttacctcaactgttttctaactggtaagatcacgaaaaggcaatgtttaaggtatttcaaggccacttttaaacaacatactttactgaattcttcttcaaggaagtgatgtgagttattttgcacggccctgccccaccaaacaaacccattatcagagaacgtttttctctatggacgctctcacagagtcagcagacaaaggccgagcctaagtgggcacccagcacagctgccctttcaccaaagaagtaacaggtgatgacctttattcacacaggggttgacatctttgaatccacagctcacaggaacacagcgcctcagtgcccacaaccgagtcaccagtcccaagcctcaggagcccaaggaacttgtattcatagcttctcagcagccctgatccctacaccattgtccacccaggcattagtggtgaggataactaattaggagcattcggatttaacaagcagaaaaacaaagcgtgacagctcgcctgtgttgttccatggcaagtgcctgtgtccgctgcagccggcactgccttcagaaaccactgaacataatctggggcgagacaggaacgaggcctccattaaaacatcactaaatctctgttaactattttagccacggctcttccaaccaattaatgagctaggaaagaggactataagttatttggggaacaaattatgccttttaagcaagtgggttttcaaaaaatgaatgcacaggctaagatcttgctggggaggaggaagggattgagtgttatcctttgaagttttgatagacaggcagcagagcaaatggaaaagtgctgtttctcaagagagcaggtgtatcttgagtgggtgccgaacagttcatgcctcatgctcggtctcccagtgtgtttcacatcgtacagggaggggaacgggaagagtgacaactgctgctaggtgccaggactggagctgggtcttctgacttctcactttcagtcttgatgtccttactacctgctgagcataactactagttttctggtgttttggtgatggggccagttagctgagtgggttaaagcaggtgattagcaaggtgctggtgcagattgttctttatgcaagctgacttttctgttctgcagacccaggcactacagccaaatctaacctgatccacagatgattgaaggatcgggggagctcggcacgggatgtggcagcaaatgtgcggcactaaggacaaagtcactgccttttgtggaagccagatcagaaagatgactgtgtgttgtgagtggtggatagagagccctgttgcccaggtgagaaggagctcagttgagataaggattccaggagccaactcgagcccctcaggtagagacaacaataccggttgaggctgcagctgtggagttggatggtgtttagtcagtgctgaaatcactttcctgggagtcccttggcatgcagtcatctgagtgctgttgttgttgttgggtttttgttgtttcctattttaaaagagtaatcataatactgacgaagtgagggcctgttttcaaagaacatttacttaaagatatagagtaaggttagcatcggtcttgccagtggtagaaacctatgccaccaacagccatcatgaaagggccccaggagtctttctggttcttcatttctattcagtttgattcaacaagtgtgtattgattgaatgctttctgtgtgccaatcattgagctagccacagaggaggcaaaggtgattaagccacaattccttccctcactgagctcacagtctgatgagagaggcagataggcattgttgaagtcagcggagttgaacctagggtacttggggaatacatctgaccaagtgtgtggcagattgtattttgcaaaaatagctgcaacagtatcttccatcccacatgtctttcttacactgtgactttgatgctcctcctattcagtagtgagatctgtgttccttctccccgaatttgggcaggtctgtgactatggaagtgatgccatgtgatttccaaagccaagtcataaaaggtgatatagctccaacctggtgctgtctggagatgctcactcatggcaacccagtggccatgttgtaaggaagtccagattagccctcatagaacaaccacatgaacaggcctcatatggtagttgttctagctggcagcgatcatcagccaccagagagatgagtgaagacagccccacatgattccagctgctagccttcaagtcttctcacctaggctagagatgaggctgcagatattatggagcagaaacaaaccatctccacagtgtccttcctggagtcctgaccgaccgacaaaatgtgtgagcccataataaaatggttgttttgcaccactaggtttttgttcgttggttttttttcaccactaagttttggggtaatttgttttgcagtaatagtaaccagaacacccagtaacttggccatcagggaaggcttcctagaggctatgactgtaagttaaaattttggcccataatcatgagccagagagagaggactaggaagagaactttgaggccatggtaaccttaaaccactctaatgatctgatctacagtgtttcttccatgggggcaagctaaagaaaattttcactaccaactgtgacatttcttaacactgtctgcatgcttcaggattattctgataaattgtctcaacaaaacattcgtagaatgagtaaaacggtatcgcttcacttccctcagaaatgaaagattctgggatgtgccttgaggtgcaagaacgaggaattgagttttaaatctttccatcccacctgtgcacctgaaatgtgagcccaactctgtcaccaagcccctcgctgggtgttttctccctattcatttattcattcagcaaatatttattaagcatgtactatgtatcaggagccatgttacccctgaaattgaaagggcacattttctcagaaacggactagattcttactgattatggtcaaactcttgcactctgtctgtgtgccaggaacttgtagtcaaagctgctcatgattctgttccacttggtgatgtccagtagaatttcatcccttgatgccttggactagccatcccaccacacccacagttggtcttcaagggactagaaggataaccagaaggcactatctattcagatgtttgagggctgaggaggtttccagcacttcacccaattcagaaatgtaaccaggatgcatggcaacctcagaagacagcattgccacatgtgtcttagcggacatcattgtctccatgtgatagtggcctgcgattccctccatatttggaacttgcagcttttcaacaatattacacccatctttgtgaggaaacattagaaggctgatggaggcagcttttcatattgttgtttggcttttatttgaacttccggctaaagcctagtgaaccatcaacacatttgctcctggaattttattttattttattttatttatttatttttttgagacaggttcttactctgctggccaggctggagtgcaggggcatgatcatggctggctgcagctttgacctcctgagcccgagcaatcctcccatctcagcctcccaggtagctgaaaccataggcacgcgccaccacgctacggctgatttttaaaatgttttatagaggtaggagtctccctatgttgctcaggctggccttgaattcctggactcaagcaatcctcccacctcagccccctgtgtagctgggactacaggcttgcaccaccatgcccagctaatttttgtggggttttttggtagagatgtgttttcgccatgtcgcccgggctgatctcgaactcctggggtcaagtgatttgcccgcctcagccttccaaagtgctgggattacaggcgtgagccagcacgcctggtccatttcacgttttaaaggagggaattctggctctagaatagagctatgttgattggtattcctgcagagaccaggcaaatggcatctgtccctgaagcaggcccaaggggagacaggttgtgcagatgaaccagagagagcttccatatctgaaaggggcagctgttactcagtagccccagagttgtctgctcttcccgttttccaagagaagccggaaatctgtatttttatgtgaaatttctcaatatttaaacactctgcaggccaaacaaaacacagccaccagttttgacctctgctttataatagagaatgcctgcttttgttccgtcaaactaatgaatgctgaattacgagaaggaatttggaggttagtgttagattgtgctcctcaaaaggcggcagaccccatcccaaacccttgagatactaattggcagacttgcacaggctgacagctggactctgaaagtggacacacacaaggaaacagccaagctattccaggtcactttgcaaggtcagggcagcaatgcaaacattaggaaggctgaagacaaaggtcaggtggcagcaaggaagccctacattcccttaagctgttggttgataaatcatattctaaaggtatcaccagactccctcaccctgacattgctttgtgaggtagaaaattaaatagaaatcaaaattaagatggctgtcaggagcttttaggaggccagcacgccagtgtgaggtgaacatgggatggagtttctgcctggagcaaaggtctcctaagggatgatgatatccaacattgggcattgcagaggtgctggccgctgcagcggtcacacactgcagctttggaggctgcctgtctatgttcaaatgccgactcaccccagaaatattaggtgaccttgggcaagtcacttctctttgtgccttaagcacttcatctctgaagtgagaataatagtacctgcccccgaaggttgttgtgaggccttagagttagtatgcataaagcacttagaactttgcctgacacttaagggcttaggagataggcactttactaggggtagagtattgctattagtgttgctgtgaggtgtggaccttgtataaacggctcctgggagttttcttcagcgtcatcaagacactgcatctgtggacactaaaccacaaccattgccacaaaagcaatgcttgctatgtctcagttttccccctcatgttccgtaggggaatctaggccatagaaacctgctatagctgcagctatatagtcaccatatggagcagcaccttggtagggaatgcagaatagcttcatttccttttgcctccaggatgatcctagaccagacctccccagtggctccataggggaattgcacctggagagcccccaccctcttgagccaaggaactctccctaggcctgcgcttgagtgagtggtactacctaccctctgaatcttgccacttgtttcttgcaagaatgcatgaccttttggtgggctatgcacagacgtcttttcaattttaacaaaaagcagtctttctgtaaattttgtagaatcctggagtacacatttttgtgcttaaagaaaaccatggagtccacactctttctacagctgcggagagaagcttaccagactgaaatgttggcagaaacaaagagacgccatgttccttcccacctgcaattatagttttactagcttgtaaagcacacatagaatttgcagtacattcttcccttgcagtaggggagaggccctgctgtgaatgtaattggctttctagcttcctttaacattgaggtggaagggaactggaccgaagggcctttactcttagaattaactgatgttgaattgtgtttaaattccatgcatctccctgaatgcatttgttccattaagtcttagtcagaagtggaggcacagcttacctctgaaaatattccaatccctatcatttctcatcactttgtaaaagctgagtttctttctttttaaaaaatggatttttaacttaacccgggtagggattattttccatcctgttaacctctgttaaagatgtatggcatctttagatgacaatttcatacagtacagcccatttaggtcactttttattctggctatggccttgcaactatatcagttcccaggaagaggaccacaggcatgtatttggatggaaactgtattactttacttctcgaatcccagtttcttcattcgtgaagtgagaggattggattaaacaatctttacagccccttccagctctagggccctcattctgtgattttatagagctcgagaagtgatgaaattgtggaagtctttctgcgtgtatctgctttctgggggctcccagccagtttgcacgaagtatccaggcttctgggtgcagcaaggaacctggaatgagagccaggtcgctgagtgtaggctcagcaccttcagttctaactgacaaatggctggatttccatttgccaaaggtcaactatttcaactttttgtcaggaaataacagctttaagcattttgacaaatatgatctgaaggacagcttattaaaacaagttaaatatactgattttatattttccttaaagacaaattgttgtcttaataccttacaattcagtggcagttaaaataatgcccagtaaacaaaagttggccagtaagaacatgcagaaggtaatatgccacctagcgggtttcctcctaaaacgggcagcaccagtcaggttatctggtgaactgtgagttggcatttgtgtttgggctaacaacagagagcccattgcagctgaggtttccaagaggtggaactatttaagaacttgggctataagggacattaagggaatggggcaccataagggaagctttagagctgaacaacaaaggaaatcaggggaaggagactgtgaaaggattcttggctagagcacaggtcaagggcacagagagaaagtaggctaggcaatcacgggtaataaaactacggatttgagtttgggtaataaaactacggatttgagtttcacctttttctcttttctctgcctcctgcctgctggggacagggactgatcatctggcagacaggcagatatgctgacagggccaggatcctcagcctgtttgctccatccctgacttggtatggtgcagtctcactgaaggcaaggggcctgcctggttcactctcattttacagcacttagccaagaggagagagggagggatggccagaaaactcacgacccaggatgacagcaacagtttatcctttagcaagtcacaaaatacctctgctgcttaaaatctttctttgtaaaatgagaaggttgtactaaataattagattaataatagctcccttttagtatatgctcaaaaaatgttactcacttttattattgagtgcttactttaggccagaccctgtcctaaatctacgtggattatctcatttaatccacacaatagccctatataatgacctataataataggtactattattatccacatttcaccaatgagatttactggcacaaagtcgtccagctaaagtggaggagctgggattcaaacccaagctgtcctgttctagtacacatcctgttttgttatgttttttcaattttgtgtgaaatgtttcaaacgtattaaaagaaagaagaatgaatactgccagctgcatgattgcttctgcagtggaaggactcccttctttagagaaatgggcacacactctgaaccactaaattggactgttttctcccagcagtcacattctctatttctagaggcaaattgctatcaaatccacctggcagcaaaacaaaccccacccccccaccccaaccaccaccatttctgaaactctaccatgtctttccactggttggaaggcaggaataatagggcaaaggtggggaaagaaaagggcaaatgcacccatcattagccctggagtgccagcaccatgcatggcaaaaaaacccagtgcttggaaagactctgtagatattgggactatattggtcaggcccagcttcctgcccagtttcccccagataggctgtaacccctaaaattatttacaggtcagtttcaactggtgccacggtggtcaaaatattttattctgtctacaccaatgacctgtagtcatcaaaaacagcaagatgctagaacaaaggaactggataatccacagaatatattgcagtccaaaagggaatgcagcctaattagatatggatttatgatgctgtgaatttcctttttgcttttttgattatttatttttaagaccaggactctctctgtcacccaggctggaatgtagtgcatgatcccagctcactgcagcctcgacttcccaggctcaagcagtgctcccacctcagtctctcatgtagctgaaactacaggtgtgcgccaccacacccagctaattttttttatttttagtagagacaaggtctcgctgtgtttcgcaggctggtctcgaactcctgagctcaagtgatcctcccacctcggcctcccaaagtgctgggattacaggtgtgagccactgcacctggccttgctttttgtttttgttttgtttttcaaaattttcaggttagcacactctgtatctgtagctatgactgacctgtgtcagtgtgtggttttgtatttatagctggcctgattccaaaaaggacttttgagagagagcttctctctttctctctctctctgtcatgcatatatatgtgtgtgtatttataactgtgactaattttaattcctatccccttccattggtttgaattattgacatatacacttgtcaaagatgagtctttgctacccaggatcccgcatgtctggagttctgctagcatccatcccctagtttatggttaaaaaacccaacttctaaaattgccatcagcctaaaggttcccttcagccacgcaaaagatagcaaaaatctctgatgcagctgacattttaggtgtgtgtataatttaacaaattgttgaccactcagcttttagtcagtggtcacaaaaggaattagcagccctcccctgctcccccaaaacccaaagaaggaagggtgttccttggctttggcccagaggcctgctggcacgcagtgtcaaacagcagcacaatggtacattttggccacaaaaggctttggggtggcagaaagggccaaaatagttgtggcataagttggctgggatattaagtaaatctgagtttaatttaacatagagataacaacgctttttttgttttccaactggctgctgctttctctgtctccatgagaccaaagattggagccaggagttagttcatgagggtattcaagtcctttcaaagtgagacatgcagtggtctttacacaggctttcacgtttgtctgggcaagatggagtaaggataaaaaggcacatgggtagctgggggaagctgaaaatggatcttgaggcttgaattccttctatgagtttgcttaagccacatcgcctgagcttagaatagcgaggcaggcagtctgtctccttgggataaggaaggatttggaactcggcgactgtgaggtcttggcccctactgtgttttctggtttgttttgttaacaggagcaagttattctagtttcttgcttctgggtttttcttcagcacactttaagcaatgagtctccaccccaccaatggcaatggggtggatggaatgggataatgaaaggggtggcgagagaagttgattcagctgcttaggatgagggaggcaatcttcagaccttggatttagcttctgaatctgtcaagggtggagagggaagggttccacgggattgaaaccatctcagcgtaggagagaagttgaagtctttctgagaaactgatatggccagccgtgctagttaggaaaaccagcttattgtctcaactgcaattttattacccatgaaatggttaacagtggaggagaagctatagtattttaaaatgcaatctgcgaaatgtaaccaatcaaaaatgattatgatgcattggtatggatgtgtatggtaaatggtatgctgtgtacatttaccacaataagaaaaagaatatcatcccctttacaaaaatgatgatgagcaccgcaggaaagtactggcactgcatgacttacggagtctattttacagcctttccaggatctgttcagtgctaggttcaatgtactgtgatgcagtgagtttgaagaaaagtataagacaagacacacattctaggtgggagtgtgctgacagtcctctgaactgagaggagaggaatacagttaggaggaaatcaccagcccctcataccca

SEQ ID NO: 1134 - DNA, 1680 bp, Homo sapiens
atgagaaggaggagtgacttattggcaagtttaggagaggaaccaggtaattcagctgctgtcctaagagcactaattctggtccgctcccccagatctgctcctccatgccatcagcccttcatgggcagtttcccaggaggggaggcctctggctatccagtgatgcttgtgactcagaggcgaggttggggaatcaggacagactctctgaaagaggaacacaagcagacattcccaaacattctaaagaagggttacctggagattagaaaggaccatgacagttactggcaaagctgttatgcagaactttcaccttacaacttatacttctacagcctcgacagcagtgggaatcaaaacctttatgccacgtaccagctttcacacttccagagcatatctgttttaggcaacctggaggccaggatggtggatactgttttgtatgacaacactcagctacagctaaaggcagagtcaccatgggaggctttggactggggacagaagctttgggaagtagtgcatgctgctgtgcccggttacatggggcggcagaacgagctgacaatctcaccagggcttggccatcatgatgactatacacagaatcatagtttccagaagaaaaccagtgggctgctgccaccgtcccctgtcctggacagctccaaacagtaccaaaacatcctcaaatcagggactctctacaggctgactgtccaaaacaactggaaggcatttacatttgtgctgagcagggcttaccttatggcttttcagcctggcaagctagacgaggatccactgttgagctacaacgtggacgtgtgtctggctgtccagatggacaacctggatggctgcgactcttgctttcaagtcattttcccccaggatgtccttcgcctccgagctgagacccgacagagggctcaggaatggatggaggctctgaagatagctgccaatgtggcgaggagttcagagcaaaacctgcaagtcacactgaggaacaaacccaaggatcaaatgggtgggcatgaactcaggaagaacaaacgccaatctgtgactaccagcttcctgagcattttgacgactttgtctttggaacgaggactcactgctcagagtttcaaatgtgcaggctgccagcgatccataggtctttccaatgggaaagccaaggtgtgcaactacagtgggtggtattactgcagtagctgccacgtggatgacagctttctcattccagcacgcatagtccacaactgggatacttcaaaatataaggtgtcgaagcaggccaaggagtttctggagtacgtgtacgaagagccgctcatcgacatccagcaggagaacgccatgctgtaccaccacgcagagccgctggccgccgtgctgcggctgcggcagcggctgaagtcgctccgagcctatttgttcagctgccgggcagcggtggcagaggatctccgccgcagaattttccccagagaatacctccttcaacagatccacctgtattcacttgccgacctgcagcaggggttgacatctttgaatccacagctcacaggaacacagcgcctcagtgcccacaaccgagtcaccagtcccaagcctcaggagcccaaggaacttgtattcatagcttctcagcagccc

SEQ ID NO: 1135 - protein, 558 aa, Homo sapiens
MRRRSDLLASLGEEPGNSAAVLRALILVRSPRSAPPCHQPFMGSFPGGEASGYPVMLVTQRRGWGIRTDSLKEEHKQTFPNILKKGYLEIRKDHDSYWQSCYAELSPYNLYFYSLDSSGNQNLYATYQLSHFQSISVLGNLEARMVDTVLYDNTQLQLKAESPWEALDWGQKLWEVVHAAVPGYMGRQNELTISPGLGHHDDYTQNHSFQKKTSGLLPPSPVLDSSKQYQNILKSGTLYRLTVQNNWKAFTFVLSRAYLMAFQPGKLDEDPLLSYNVDVCLAVQMDNLDGCDSCFQVIFPQDVLRLRAETRQRAQEWMEALKIAANVARSSEQNLQVTLRNKPKDQMGGHELRKNKRQSVTTSFLSILTTLSLERGLTAQSFKCAGCQRSIGLSNGKAKVCNYSGWYYCSSCHVDDSFLIPARIVHNWDTSKYKVSKQAKEFLEYVYEEPLIDIQQENAMLYHHAEPLAAVLRLRQRLKSLRAYLFSCRAAVAEDLRRRIFPREYLLQQIHKLADLQQGLTSLNPQLTGTQRLSAHNRVTSPKPQEPKELVFIASQQP

SEQ ID NO: 1136 - DNA, 1582 bp, Homo sapiens
agaactttcaccttacaacttatacttctacagcctcgacagcagtgggaatcaaaacctttatgccacgtaccagctttcacacttccagagcatatctgttttaggcaacctggaggccaggatggtggatactgttttgtatgacaacactcagctacagctaaaggcagagtcaccatgggaggctttggactggggacagaagctttgggaagtagtgcatgctgctgtgcccggttacatggggcggcagaacgagctgacaatctcaccagggcttggccatcatgatgactatacacagaatcatagtttccagaagaaaaccagtgggctgctgccaccgtcccctgtcctggacagctccaaacagtaccaaaacatcctcaaatcagggactctctacaggctgactgtccaaaacaactggaaggcatttacatttgtgctgagcagggcttaccttatggcttttcagcctggcaagctagacgaggatccactgttgagctacaacgtggacgtgtgtctggctgtccagatggacaacctggatggctgcgactcttgctttcaagtcattttcccccaggatgtccttcgcctccgagctgagacccgacagagggctcaggaatggatggaggctctgaagatagctgccaatgtggcgaggagttcagagcaaaacctgcaagtcacactgaggaacaaacccaaggatcaaatgggtgggcatgaactcaggaagaacaaacgccaatctgtgactaccagcttcctgagcattttgacgactttgtctttggaacgaggactcactgctcagagtttcaaatgtgcaggtatgaagcagattttcagcctatagctcattaaagaacaatcctgaaccccacaattggaattcactttaaaaatccccttaataggctagtcacagctatctcctgtttataaaaagtatctctcctcgagaagcttactgtattaaaacatcctatattaaattactatattaaaacataaggacaaccatctttatcccatgctgttgaagtaaatagaagcagctatgatatatcccgttgaatcaaaatgatttggctaaagcttaaccagactagaatttaggtttcctgagtcggctgtgattccattccctctgctttcttgaataaaggtcactgtgaatatggatgtcacaaattgtctcataagaaacattcaagtccaaagctgactactaaaactccttaggcaaggaaaatggccacagtcagtaactgtcattgatcttgaccttgtcaaatcgtcttaaggtgaaatctagaaaatcagtcttgacagaaaatgtgggggtggctaaaagcggagtaaatgatgattcagcagatgaccactgagtcactatgggcttatgcccatcatggggaagcccaggccttctggaactgctatgtaaggatgagatgcaaagtggagtttgaggtcaacaatcttattttgtaaaagcttgttacttcatctttcctctactccccattctttccacctttcctgaaacagtaaaattacc

SEQ ID NO: 1137 - protein, 249 aa, Homo sapiens
MVDTVLYDNTQLQLKAESPWEALDWGQKLWEVVHAAVPGYMGRQNELTISPGLGHHDDYTQNHSFQKKTSGLLPPSPVLDSSKQYQNILKSGTLYRLTVQNNWKAFTFVLSRAYLMAFQPGKLDEDPLLSYNVDVCLAVQMDNLDGCDSCFQVIFPQDVLRLRAETRQRAQEWMEALKIAANVARSSEQNLQVTLRNKPKDQMGGHELRKNKRQSVTTSFLSILTTLSLERGLTAQSFKCAGMKQIFSL
